United States Patent Application Publication US 2005/0244851 A1 - sequence listing, part 156

SEQ ID NO: 6091603 - DNA, 25 bp, Homo sapien
caaagatggtgagaagaaactgact

SEQ ID NO: 6091604 - DNA, 25 bp, Homo sapien
gtagtgatctatctcatttgggcca

SEQ ID NO: 6091605 - DNA, 25 bp, Homo sapien
ttctgagaatgttgtgaccggtcta

SEQ ID NO: 6091606 - DNA, 25 bp, Homo sapien
tggcaagagctttgctgcgtctctc

SEQ ID NO: 6091607 - DNA, 25 bp, Homo sapien
cactgttgtagaagtgagggctgaa

SEQ ID NO: 6091608 - DNA, 25 bp, Homo sapien
agttctgccccgtcttgtcactggg

SEQ ID NO: 6091609 - DNA, 25 bp, Homo sapien
ggcctctgcactccataggcctggg

SEQ ID NO: 6091610 - DNA, 25 bp, Homo sapien
gaagttgtcggccacgtactggtag

SEQ ID NO: 6091611 - DNA, 25 bp, Homo sapien
agccgagtaggaatagggtggccgc

SEQ ID NO: 6091612 - DNA, 25 bp, Homo sapien
gtgaggcgcttgtcgggtgccccgt

SEQ ID NO: 6091613 - DNA, 25 bp, Homo sapien
ggtgttgacactgttgtagaagtga

SEQ ID NO: 6091614 - DNA, 25 bp, Homo sapien
cagggctcagtcctggtgtgaccaa

SEQ ID NO: 6091615 - DNA, 25 bp, Homo sapien
ttgaaggtcagtgagttctgccccg

SEQ ID NO: 6091616 - DNA, 25 bp, Homo sapien
tagatctggctgagagtgaggcgct

SEQ ID NO: 6091617 - DNA, 25 bp, Homo sapien
gggcatggggttcgcccagtcaccc

SEQ ID NO: 6091618 - DNA, 25 bp, Homo sapien
ggtcagtgagttctgccccgtcttg

SEQ ID NO: 6091619 - DNA, 25 bp, Homo sapien
caaaagatgttatggcagggaatag

SEQ ID NO: 6091620 - DNA, 25 bp, Homo sapien
gcaaaagatgttatggcagggaata

SEQ ID NO: 6091621 - DNA, 25 bp, Homo sapien
aaaagatgttatggcagggaataga

SEQ ID NO: 6091622 - DNA, 25 bp, Homo sapien
tccccgcggccttcgcttttagctc

SEQ ID NO: 6091623 - DNA, 25 bp, Homo sapien
ggagccgaccaccatgaataagcaa

SEQ ID NO: 6091624 - DNA, 25 bp, Homo sapien
gaggaacacgtagcaaaggctttgc

SEQ ID NO: 6091625 - DNA, 25 bp, Homo sapien
caaaccctgcggttcatgaggagag

SEQ ID NO: 6091626 - DNA, 25 bp, Homo sapien
ccaccataatgtgggaggaacacgt

SEQ ID NO: 6091627 - DNA, 25 bp, Homo sapien
gtaccgtagagggttgcacacagcc

SEQ ID NO: 6091628 - DNA, 25 bp, Homo sapien
aggctgccccgtagaaaacgctcac

SEQ ID NO: 6091629 - DNA, 25 bp, Homo sapien
tagtgacaggagtcagcatgaaccc

SEQ ID NO: 6091630 - DNA, 25 bp, Homo sapien
gaaaaagtgattgatctctcgggat

SEQ ID NO: 6091631 - DNA, 25 bp, Homo sapien
gagtcagcatgaacccatccaagga

SEQ ID NO: 6091632 - DNA, 25 bp, Homo sapien
gagatgacagatagagggataagca

SEQ ID NO: 6091633 - DNA, 25 bp, Homo sapien
acgttggtgtagaaggctgccccgt

SEQ ID NO: 6091634 - DNA, 25 bp, Homo sapien
catagagtgacgtgtctgtgcaaga

SEQ ID NO: 6091635 - DNA, 25 bp, Homo sapien
gaaacagttgaggtaagataatggg

SEQ ID NO: 6091636 - DNA, 25 bp, Homo sapien
gtccaagtggctccagaggaaacag

SEQ ID NO: 6091637 - DNA, 25 bp, Homo sapien
gtagaaggtttcctagaggccagtg

SEQ ID NO: 6091638 - DNA, 25 bp, Homo sapien
caatggaaggatagcaatgccttac

SEQ ID NO: 6091639 - DNA, 25 bp, Homo sapien
gccagtggtcaccttaaaacaaagc

SEQ ID NO: 6091640 - DNA, 25 bp, Homo sapien
aaggtttcctagaggccagtggtca

SEQ ID NO: 6091641 - DNA, 25 bp, Homo sapien
tcgctccaggccaattaggtaggtc

SEQ ID NO: 6091642 - DNA, 25 bp, Homo sapien
tggtcaccttaaaacaaagcttcag

SEQ ID NO: 6091643 - DNA, 25 bp, Homo sapien
agctgtcctcgctccaggccaatta

SEQ ID NO: 6091644 - DNA, 25 bp, Homo sapien
gccaattaggtaggtcagatactca

SEQ ID NO: 6091645 - DNA, 25 bp, Homo sapien
caatgccttactacaatgccgttta

SEQ ID NO: 6091646 - DNA, 25 bp, Homo sapien
tgaagtgttagtaagaagaaaagac

SEQ ID NO: 6091647 - DNA, 25 bp, Homo sapien
gattttagaatttacaccctgagtg

SEQ ID NO: 6091648 - DNA, 25 bp, Homo sapien
caccctgagtgttgtacatacaaaa

SEQ ID NO: 6091649 - DNA, 25 bp, Homo sapien
ttcagtctgacaacccttcaggggc

SEQ ID NO: 6091650 - DNA, 25 bp, Homo sapien
gacacagaggattcgttcacccagt

SEQ ID NO: 6091651 - DNA, 25 bp, Homo sapien
ggagtcagaccaagagatctggtgt

SEQ ID NO: 6091652 - DNA, 25 bp, Homo sapien
gattcgttcacccagttttatctga

SEQ ID NO: 6091653 - DNA, 25 bp, Homo sapien
cagctgaattctaggtgtgatttta

SEQ ID NO: 6091654 - DNA, 25 bp, Homo sapien
aaatgtttgatgtggctatgagttg

SEQ ID NO: 6091655 - DNA, 25 bp, Homo sapien
ccaagagatctggtgtctcagaggc

SEQ ID NO: 6091656 - DNA, 25 bp, Homo sapien
ccacaattctgcctaactttttaga

SEQ ID NO: 6091657 - DNA, 25 bp, Homo sapien
tctttattagacacagaggattcgt

SEQ ID NO: 6091658 - DNA, 25 bp, Homo sapien
gctatgagttgaaaacacaaggaac

SEQ ID NO: 6091659 - DNA, 25 bp, Homo sapien
gcagcccacatttttcttagaagga

SEQ ID NO: 6091660 - DNA, 25 bp, Homo sapien
cagactcctccactgtatacacagg

SEQ ID NO: 6091661 - DNA, 25 bp, Homo sapien
tgtgcttgtaataccagccactcgg

SEQ ID NO: 6091662 - DNA, 25 bp, Homo sapien
gcaatagagcaagaccctgtttcaa

SEQ ID NO: 6091663 - DNA, 25 bp, Homo sapien
taaactaggaagagccaccactctg

SEQ ID NO: 6091664 - DNA, 25 bp, Homo sapien
tatataactttcaagagcagcccac

SEQ ID NO: 6091665 - DNA, 25 bp, Homo sapien
tatacacaggagaaaaccaatccct

SEQ ID NO: 6091666 - DNA, 25 bp, Homo sapien
tgtgctccagcctaggcaatagagc

SEQ ID NO: 6091667 - DNA, 25 bp, Homo sapien
tgccactggttggagctgatcaccc

SEQ ID NO: 6091668 - DNA, 25 bp, Homo sapien
ttagaaggacacaagaacacggagc

SEQ ID NO: 6091669 - DNA, 25 bp, Homo sapien
tatatggctggatgcagtggctcac

SEQ ID NO: 6091670 - DNA, 25 bp, Homo sapien
cacggagcacaaaaactaaactagg

SEQ ID NO: 6091671 - DNA, 25 bp, Homo sapien
agttttactgtattacttcttgctt

SEQ ID NO: 6091672 - DNA, 25 bp, Homo sapien
agcaaacaaaagtgagctctcagct

SEQ ID NO: 6091673 - DNA, 25 bp, Homo sapien
gaatgtccagacttactggagaata

SEQ ID NO: 6091674 - DNA, 25 bp, Homo sapien
tccagcctgatctcatacaatacca

SEQ ID NO: 6091675 - DNA, 25 bp, Homo sapien
gtccagacttactggagaataaaag

SEQ ID NO: 6091676 - DNA, 25 bp, Homo sapien
agcctgatctcatacaataccattt

SEQ ID NO: 6091677 - DNA, 25 bp, Homo sapien
atccagcctgatctcatacaatacc

SEQ ID NO: 6091678 - DNA, 25 bp, Homo sapien
caaacaaaagtgagctctcagctgg

SEQ ID NO: 6091679 - DNA, 25 bp, Homo sapien
caccaggtatatcagaatgtccaga

SEQ ID NO: 6091680 - DNA, 25 bp, Homo sapien
acaccaggtatatcagaatgtccag

SEQ ID NO: 6091681 - DNA, 25 bp, Homo sapien
accaggtatatcagaatgtccagac

SEQ ID NO: 6091682 - DNA, 25 bp, Homo sapien
cagacttactggagaataaaagtgg

SEQ ID NO: 6091683 - DNA, 25 bp, Homo sapien
cctaaagttgtagaaaatgatcttc

SEQ ID NO: 6091684 - DNA, 25 bp, Homo sapien
cacatgaagaggcaagagtgcatcc

SEQ ID NO: 6091685 - DNA, 25 bp, Homo sapien
gtgcacaagtgccaatctcgactgg

SEQ ID NO: 6091686 - DNA, 25 bp, Homo sapien
cagccatccttgtatacacttcaga

SEQ ID NO: 6091687 - DNA, 25 bp, Homo sapien
gattggccaatagcagatttttccc

SEQ ID NO: 6091688 - DNA, 25 bp, Homo sapien
gctttgtctctctactcacatgaag

SEQ ID NO: 6091689 - DNA, 25 bp, Homo sapien
ccaatgcatgtggagcgccagtgag

SEQ ID NO: 6091690 - DNA, 25 bp, Homo sapien
gcagaactatgcgaagaaattaggc

SEQ ID NO: 6091691 - DNA, 25 bp, Homo sapien
agtgagtgcccctgaactattccca

SEQ ID NO: 6091692 - DNA, 25 bp, Homo sapien
gcagctaagtctctaatcttcagaa

SEQ ID NO: 6091693 - DNA, 25 bp, Homo sapien
tttgggcaaccatttggtgccagcc

SEQ ID NO: 6091694 - DNA, 25 bp, Homo sapien
tttgagaccgaacaccaaagatctg

SEQ ID NO: 6091695 - DNA, 25 bp, Homo sapien
ttggtacctccatagaagctcatct

SEQ ID NO: 6091696 - DNA, 25 bp, Homo sapien
ccatagaagggttggccagccagaa

SEQ ID NO: 6091697 - DNA, 25 bp, Homo sapien
cagctggctctagagcgtgcagaag

SEQ ID NO: 6091698 - DNA, 25 bp, Homo sapien
gagcggctcatcgagaaggccggcg

SEQ ID NO: 6091699 - DNA, 25 bp, Homo sapien
gtgagttgcagtcctccacgtggta

SEQ ID NO: 6091700 - DNA, 25 bp, Homo sapien
gttgtgcccagctggctctagagcg

SEQ ID NO: 6091701 - DNA, 25 bp, Homo sapien
ccatggttccactcggtggccgggc

SEQ ID NO: 6091702 - DNA, 25 bp, Homo sapien
aagggaagcgtgagttgcagtcctc

SEQ ID NO: 6091703 - DNA, 25 bp, Homo sapien
tgtccacagcccatagaagggttgg

SEQ ID NO: 6091704 - DNA, 25 bp, Homo sapien
tgggtctgcgtacaccctggatgac

SEQ ID NO: 6091705 - DNA, 25 bp, Homo sapien
cgtggcgcttgggtctgcgtacacc

SEQ ID NO: 6091706 - DNA, 25 bp, Homo sapien
tcccaggaaggatattgtaggtgtt

SEQ ID NO: 6091707 - DNA, 25 bp, Homo sapien
ttcgggctgccgaaagagaaggctg

SEQ ID NO: 6091708 - DNA, 25 bp, Homo sapien
ttaattgtggcaaatccatttactt

SEQ ID NO: 6091709 - DNA, 25 bp, Homo sapien
tcaggctgggcggtattttcagtgc

SEQ ID NO: 6091710 - DNA, 25 bp, Homo sapien
ccataaccacattgaccacgcagtg

SEQ ID NO: 6091711 - DNA, 25 bp, Homo sapien
gcttccaaaactcacggatttgagg

SEQ ID NO: 6091712 - DNA, 25 bp, Homo sapien
acattgaccacgcagtgttttccaa

SEQ ID NO: 6091713 - DNA, 25 bp, Homo sapien
aacaccagcaacagcgaacagccga

SEQ ID NO: 6091714 - DNA, 25 bp, Homo sapien
tatgatagaacgcactagaaaaggt

SEQ ID NO: 6091715 - DNA, 25 bp, Homo sapien
gcggtattttcagtgcaaccaagaa

SEQ ID NO: 6091716 - DNA, 25 bp, Homo sapien
tgtgcaaccgttaactatgatagaa

SEQ ID NO: 6091717 - DNA, 25 bp, Homo sapien
agcgaacagccgagcgtctcctcgg

SEQ ID NO: 6091718 - DNA, 25 bp, Homo sapien
gggacagcacgggaacaccatcagg

SEQ ID NO: 6091719 - DNA, 25 bp, Homo sapien
ataaatagtttagaacaccagcaac

SEQ ID NO: 6091720 - DNA, 25 bp, Homo sapien
tagctggatgtagtggcaggcacct

SEQ ID NO: 6091721 - DNA, 25 bp, Homo sapien
tccaacctgggctataagagcaaaa

SEQ ID NO: 6091722 - DNA, 25 bp, Homo sapien
ttaaatgtccatcaggagggtccac

SEQ ID NO: 6091723 - DNA, 25 bp, Homo sapien
gagatgggcgaatcacctgaggtca

SEQ ID NO: 6091724 - DNA, 25 bp, Homo sapien
gatgggataccatgcagttatacca

SEQ ID NO: 6091725 - DNA, 25 bp, Homo sapien
gccaagattgtgttactgtactcca

SEQ ID NO: 6091726 - DNA, 25 bp, Homo sapien
gaagttcctcatgagctgataaaga

SEQ ID NO: 6091727 - DNA, 25 bp, Homo sapien
ggcagaagttgctgcgagccaagat

SEQ ID NO: 6091728 - DNA, 25 bp, Homo sapien
aaatacatatgtaggccgggcaccg

SEQ ID NO: 6091729 - DNA, 25 bp, Homo sapien
tgtgtatcatatcctaccacttggg

SEQ ID NO: 6091730 - DNA, 25 bp, Homo sapien
aaagaatgaagttccagccgggcac

SEQ ID NO: 6091731 - DNA, 25 bp, Homo sapien
gagggtccacatccaatgaatcatg

SEQ ID NO: 6091732 - DNA, 25 bp, Homo sapien
agtgcgttgcgccagaatttctccg

SEQ ID NO: 6091733 - DNA, 25 bp, Homo sapien
gttcccgccagtcggtgaacagtcg

SEQ ID NO: 6091734 - DNA, 25 bp, Homo sapien
agccggcacgaaggcctcataggtg

SEQ ID NO: 6091735 - DNA, 25 bp, Homo sapien
aaggtcctcatagacttggctgcgg

SEQ ID NO: 6091736 - DNA, 25 bp, Homo sapien
tcatccacatgcacgaaggcgtcag

SEQ ID NO: 6091737 - DNA, 25 bp, Homo sapien
gcacagtggccgtccattggcacgg

SEQ ID NO: 6091738 - DNA, 25 bp, Homo sapien
cattcatgccagtgaggaaagccgc

SEQ ID NO: 6091739 - DNA, 25 bp, Homo sapien
tgtcacgccaggcaaagaagcgttg

SEQ ID NO: 6091740 - DNA, 25 bp, Homo sapien
aaagaagcgttggtatcggctctca

SEQ ID NO: 6091741 - DNA, 25 bp, Homo sapien
tctccgtaatgtagtcgcggtgctg

SEQ ID NO: 6091742 - DNA, 25 bp, Homo sapien
cagatggcacagaaacgttcccgcc

SEQ ID NO: 6091743 - DNA, 25 bp, Homo sapien
caaagacatccacccgcagatgagg

SEQ ID NO: 6091744 - DNA, 25 bp, Homo sapien
cattcatgccagtgaggaaagccgc

SEQ ID NO: 6091745 - DNA, 25 bp, Homo sapien
gttcccgccagtcggtgaacagtcg

SEQ ID NO: 6091746 - DNA, 25 bp, Homo sapien
cagatggcacagaaacgttcccgcc

SEQ ID NO: 6091747 - DNA, 25 bp, Homo sapien
aaagaagcgttggtatcggctctca

SEQ ID NO: 6091748 - DNA, 25 bp, Homo sapien
gcacagtggccgtccattggcacgg

SEQ ID NO: 6091749 - DNA, 25 bp, Homo sapien
caaagacatccacccgcagatgagg

SEQ ID NO: 6091750 - DNA, 25 bp, Homo sapien
tgtcacgccaggcaaagaagcgttg

SEQ ID NO: 6091751 - DNA, 25 bp, Homo sapien
tctccgtaatgtagtcgcggtgctg

SEQ ID NO: 6091752 - DNA, 25 bp, Homo sapien
agccggcacgaaggcctcataggtg

SEQ ID NO: 6091753 - DNA, 25 bp, Homo sapien
aaggtcctcatagacttggctgcgg

SEQ ID NO: 6091754 - DNA, 25 bp, Homo sapien
agtgcgttgcgccagaatttctccg

SEQ ID NO: 6091755 - DNA, 25 bp, Homo sapien
tcatccacatgcacgaaggcgtcag

SEQ ID NO: 6091756 - DNA, 25 bp, Homo sapien
tgttcctgcagtctctagcccgaga

SEQ ID NO: 6091757 - DNA, 25 bp, Homo sapien
ttgcactagcgtattcacatgttcc

SEQ ID NO: 6091758 - DNA, 25 bp, Homo sapien
tatcaggtgatctttagggacccaa

SEQ ID NO: 6091759 - DNA, 25 bp, Homo sapien
caaacttgttatcaggtgatcttta

SEQ ID NO: 6091760 - DNA, 25 bp, Homo sapien
gacgcaagccgtcacacctggttag

SEQ ID NO: 6091761 - DNA, 25 bp, Homo sapien
tagatcaactttacattgccaatgc

SEQ ID NO: 6091762 - DNA, 25 bp, Homo sapien
taaatgatagtacagacgcaagccg

SEQ ID NO: 6091763 - DNA, 25 bp, Homo sapien
caggctggaattgcactagcgtatt

SEQ ID NO: 6091764 - DNA, 25 bp, Homo sapien
gccgtcacacctggttagcttcatt

SEQ ID NO: 6091765 - DNA, 25 bp, Homo sapien
cagcctaccgagtaaatgatagtac

SEQ ID NO: 6091766 - DNA, 25 bp, Homo sapien
ctgcagtctctagcccgagagttta

SEQ ID NO: 6091767 - DNA, 25 bp, Homo sapien
cgcgcacggcggaaaacgagatttt

SEQ ID NO: 6091768 - DNA, 25 bp, Homo sapien
ggcgggcgcggaggccaggacttgc

SEQ ID NO: 6091769 - DNA, 25 bp, Homo sapien
gacgccaggcacaggaatcagggcc

SEQ ID NO: 6091770 - DNA, 25 bp, Homo sapien
ggccgagggcacctccagggggtca

SEQ ID NO: 6091771 - DNA, 25 bp, Homo sapien
aaatatgatctccagacatctcact

SEQ ID NO: 6091772 - DNA, 25 bp, Homo sapien
agttagccactatacatgttcatct

SEQ ID NO: 6091773 - DNA, 25 bp, Homo sapien
ccggtgggccgagggcacctccagg

SEQ ID NO: 6091774 - DNA, 25 bp, Homo sapien
agcccacaagcagactgtacaaagt

SEQ ID NO: 6091775 - DNA, 25 bp, Homo sapien
attgtgtgtgcaggacgtgcccaga

SEQ ID NO: 6091776 - DNA, 25 bp, Homo sapien
ccccttaagttagccactatacatg

SEQ ID NO: 6091777 - DNA, 25 bp, Homo sapien
cagggcctggggtccctggaccaca

SEQ ID NO: 6091778 - DNA, 25 bp, Homo sapien
cggcgggtacggctcgcgtgggcgg

SEQ ID NO: 6091779 - DNA, 25 bp, Homo sapien
tgggcacagtgcctggaagtgtcag

SEQ ID NO: 6091780 - DNA, 25 bp, Homo sapien
gatctccagacatctcacttttgaa

SEQ ID NO: 6091781 - DNA, 25 bp, Homo sapien
aaagaacccccatctgcgatgcctg

SEQ ID NO: 6091782 - DNA, 25 bp, Homo sapien
gtacggctcgcgtgggcgggcgggc

SEQ ID NO: 6091783 - DNA, 25 bp, Homo sapien
cccctggggcttgggagaggcagac

SEQ ID NO: 6091784 - DNA, 25 bp, Homo sapien
caaacacaggtactgaataaattaa

SEQ ID NO: 6091785 - DNA, 25 bp, Homo sapien
ttcatcttctgacaggcggggccag

SEQ ID NO: 6091786 - DNA, 25 bp, Homo sapien
acctgtataaaaaaatatgatctcc

SEQ ID NO: 6091787 - DNA, 25 bp, Homo sapien
acttgcattgtgtgtgcaggacgtg

SEQ ID NO: 6091788 - DNA, 25 bp, Homo sapien
tttcagagcccacaagcagactgta

SEQ ID NO: 6091789 - DNA, 25 bp, Homo sapien
acgctcaggctctggccccacccca

SEQ ID NO: 6091790 - DNA, 25 bp, Homo sapien
cataaataacagagttggcggcggg

SEQ ID NO: 6091791 - DNA, 25 bp, Homo sapien
cattttaattgaaatacctgtataa

SEQ ID NO: 6091792 - DNA, 25 bp, Homo sapien
ctggaagtgtcagggtcacccactc

SEQ ID NO: 6091793 - DNA, 25 bp, Homo sapien
gccaggacttgcattgtgtgtgcag

SEQ ID NO: 6091794 - DNA, 25 bp, Homo sapien
cactccccttaagttagccactata

SEQ ID NO: 6091795 - DNA, 25 bp, Homo sapien
ctggaccacagccaccccctcccct

SEQ ID NO: 6091796 - DNA, 25 bp, Homo sapien
ctggccccaccccagctttcagagc

SEQ ID NO: 6091797 - DNA, 25 bp, Homo sapien
aggaatcagggcctggggtccctgg

SEQ ID NO: 6091798 - DNA, 25 bp, Homo sapien
taacagagttggcggcgggtacggc

SEQ ID NO: 6091799 - DNA, 25 bp, Homo sapien
tatgtacaaaaacattttaattgaa

SEQ ID NO: 6091800 - DNA, 25 bp, Homo sapien
actgctcagaggaaataacctcaac

SEQ ID NO: 6091801 - DNA, 25 bp, Homo sapien
gacgtgcccagacgcacaccgcagg

SEQ ID NO: 6091802 - DNA, 25 bp, Homo sapien
tggggtccctggaccacagccaccc

SEQ ID NO: 6091803 - DNA, 25 bp, Homo sapien
aggcacaggaatcagggcctggggt

SEQ ID NO: 6091804 - DNA, 25 bp, Homo sapien
atgcctgcacacaccgcattcacac

SEQ ID NO: 6091805 - DNA, 25 bp, Homo sapien
tgtcagggtcacccactccccttaa

SEQ ID NO: 6091806 - DNA, 25 bp, Homo sapien
accgcattcacacaaacacaggtac

SEQ ID NO: 6091807 - DNA, 25 bp, Homo sapien
aaaccctgggcacagtgcctggaag

SEQ ID NO: 6091808 - DNA, 25 bp, Homo sapien
ccactgtcccctggggcttgggaga

SEQ ID NO: 6091809 - DNA, 25 bp, Homo sapien
caagcagactgtacaaagtcaataa

SEQ ID NO: 6091810 - DNA, 25 bp, Homo sapien
cagaggaaataacctcaacaaataa

SEQ ID NO: 6091811 - DNA, 25 bp, Homo sapien
ttcacacaaacacaggtactgaata

SEQ ID NO: 6091812 - DNA, 25 bp, Homo sapien
tgaaatacctgtataaaaaaatatg

SEQ ID NO: 6091813 - DNA, 25 bp, Homo sapien
ccccatctgcgatgcctgcacacac

SEQ ID NO: 6091814 - DNA, 25 bp, Homo sapien
aggctctggccccaccccagctttc

SEQ ID NO: 6091815 - DNA, 25 bp, Homo sapien
ccagctttcagagcccacaagcaga

SEQ ID NO: 6091816 - DNA, 25 bp, Homo sapien
gaactgaaagaacccccatctgcga

SEQ ID NO: 6091817 - DNA, 25 bp, Homo sapien
agttggcggcgggtacggctcgcgt

SEQ ID NO: 6091818 - DNA, 25 bp, Homo sapien
acctccagggggtcacaccataaat

SEQ ID NO: 6091819 - DNA, 25 bp, Homo sapien
cagacatctcacttttgaactgaaa

SEQ ID NO: 6091820 - DNA, 25 bp, Homo sapien
ccagacgcacaccgcaggactgagg

SEQ ID NO: 6091821 - DNA, 25 bp, Homo sapien
caggcggggccaggacagacgccag

SEQ ID NO: 6091822 - DNA, 25 bp, Homo sapien
gagggcacctccagggggtcacacc

SEQ ID NO: 6091823 - DNA, 25 bp, Homo sapien
cagtgcctggaagtgtcagggtcac

SEQ ID NO: 6091824 - DNA, 25 bp, Homo sapien
ctcgcgtgggcgggcgggcgcggag

SEQ ID NO: 6091825 - DNA, 25 bp, Homo sapien
gggccaggacagacgccaggcacag

SEQ ID NO: 6091826 - DNA, 25 bp, Homo sapien
gggcttgggagaggcagactgctca

SEQ ID NO: 6091827 - DNA, 25 bp, Homo sapien
tcacaccataaataacagagttggc

SEQ ID NO: 6091828 - DNA, 25 bp, Homo sapien
gcacacaccgcattcacacaaacac

SEQ ID NO: 6091829 - DNA, 25 bp, Homo sapien
gactgtacaaagtcaataatttaaa

SEQ ID NO: 6091830 - DNA, 25 bp, Homo sapien
aattaaacgctcaggctctggcccc

SEQ ID NO: 6091831 - DNA, 25 bp, Homo sapien
ccactatacatgttcatcttctgac

SEQ ID NO: 6091832 - DNA, 25 bp, Homo sapien
ttctgacaggcggggccaggacaga

SEQ ID NO: 6091833 - DNA, 25 bp, Homo sapien
cccaccccagctttcagagcccaca

SEQ ID NO: 6091834 - DNA, 25 bp, Homo sapien
tcacccactccccttaagttagcca

SEQ ID NO: 6091835 - DNA, 25 bp, Homo sapien
aggacagacgccaggcacaggaatc

SEQ ID NO: 6091836 - DNA, 25 bp, Homo sapien
aggtactgaataaattaaacgctca

SEQ ID NO: 6091837 - DNA, 25 bp, Homo sapien
cacagccaccccctcccctgcctcc

SEQ ID NO: 6091838 - DNA, 25 bp, Homo sapien
tctcacttttgaactgaaagaaccc

SEQ ID NO: 6091839 - DNA, 25 bp, Homo sapien
tctgcgatgcctgcacacaccgcat

SEQ ID NO: 6091840 - DNA, 25 bp, Homo sapien
gcggaggccaggacttgcattgtgt

SEQ ID NO: 6091841 - DNA, 25 bp, Homo sapien
tgggcgggcgggcgcggaggccagg

SEQ ID NO: 6091842 - DNA, 25 bp, Homo sapien
ataaaaaaatatgatctccagacat

SEQ ID NO: 6091843 - DNA, 25 bp, Homo sapien
tgggagaggcagactgctcagagga

SEQ ID NO: 6091844 - DNA, 25 bp, Homo sapien
tgtgcaggacgtgcccagacgcaca

SEQ ID NO: 6091845 - DNA, 25 bp, Homo sapien
caataaatagccccggtgggccgag

SEQ ID NO: 6091846 - DNA, 25 bp, Homo sapien
aacccaaaccctgggcacagtgcct

SEQ ID NO: 6091847 - DNA, 25 bp, Homo sapien
tacatgttcatcttctgacaggcgg

SEQ ID NO: 6091848 - DNA, 25 bp, Homo sapien
tgaataaattaaacgctcaggctct

SEQ ID NO: 6091849 - DNA, 25 bp, Homo sapien
agggggtcacaccataaataacaga

SEQ ID NO: 6091850 - DNA, 25 bp, Homo sapien
ctcccctgcctccccactgtcccct

SEQ ID NO: 6091851 - DNA, 25 bp, Homo sapien
aggcagactgctcagaggaaataac

SEQ ID NO: 6091852 - DNA, 25 bp, Homo sapien
tgcctccccactgtcccctggggct

SEQ ID NO: 6091853 - DNA, 25 bp, Homo sapien
caccccctcccctgcctccccactg

SEQ ID NO: 6091854 - DNA, 25 bp, Homo sapien
gaggcaattacgtccttgtcactgg

SEQ ID NO: 6091855 - DNA, 25 bp, Homo sapien
gacacagtgactagtaagttacaca

SEQ ID NO: 6091856 - DNA, 25 bp, Homo sapien
cccaatgtggccataagagatcaag

SEQ ID NO: 6091857 - DNA, 25 bp, Homo sapien
gaagatgcccttagtagatggagcc

SEQ ID NO: 6091858 - DNA, 25 bp, Homo sapien
aataattgtgccataatacagagac

SEQ ID NO: 6091859 - DNA, 25 bp, Homo sapien
gaaaatgaccagctcattgagggag

SEQ ID NO: 6091860 - DNA, 25 bp, Homo sapien
gatcaagatgcatattagtggtaga

SEQ ID NO: 6091861 - DNA, 25 bp, Homo sapien
gttccttaggctataaatgaaggga

SEQ ID NO: 6091862 - DNA, 25 bp, Homo sapien
cgtccttgtcactggaggcactgga

SEQ ID NO: 6091863 - DNA, 25 bp, Homo sapien
gaaaatacagtccaataattgtgcc

SEQ ID NO: 6091864 - DNA, 25 bp, Homo sapien
agtaagttacacagtccctctttca

SEQ ID NO: 6091865 - DNA, 25 bp, Homo sapien
gatggtgttgtcagcacaaaaggac

SEQ ID NO: 6091866 - DNA, 25 bp, Homo sapien
tgccgcagaaaacgagacgggccat

SEQ ID NO: 6091867 - DNA, 25 bp, Homo sapien
cacaaggatgcgagcataggaggcc

SEQ ID NO: 6091868 - DNA, 25 bp, Homo sapien
cgacagaggcgtaggctcatgatct

SEQ ID NO: 6091869 - DNA, 25 bp, Homo sapien
gactgctgtgtacatcaccgcagaa

SEQ ID NO: 6091870 - DNA, 25 bp, Homo sapien
catccctgccacaatgaggatgaag

SEQ ID NO: 6091871 - DNA, 25 bp, Homo sapien
tcacagaggtgtccgtgcacgaaag

SEQ ID NO: 6091872 - DNA, 25 bp, Homo sapien
gattatgacgctgtccacgatgcca

SEQ ID NO: 6091873 - DNA, 25 bp, Homo sapien
ggtcgcagaagtagtgaggcacctc

SEQ ID NO: 6091874 - DNA, 25 bp, Homo sapien
tagtgaggcacctcatggctgccgc

SEQ ID NO: 6091875 - DNA, 25 bp, Homo sapien
cagacaaagggcgtggctatcacca

SEQ ID NO: 6091876 - DNA, 25 bp, Homo sapien
gacacagatagacgccaatggtggt

SEQ ID NO: 6091877 - DNA, 25 bp, Homo sapien
atgaagcaggaaaacgcccagaggg

SEQ ID NO: 6091878 - DNA, 25 bp, Homo sapien
tagtggaaagggtcacagacggcca

SEQ ID NO: 6091879 - DNA, 25 bp, Homo sapien
tgaggattcgtatataagagaaagc

SEQ ID NO: 6091880 - DNA, 25 bp, Homo sapien
tcaccacggtgaggtaaaaaccaca

SEQ ID NO: 6091881 - DNA, 25 bp, Homo sapien
cgagtcaccaaaacaataggtgctt

SEQ ID NO: 6091882 - DNA, 25 bp, Homo sapien
aatatggaagagcaggacaatttca

SEQ ID NO: 6091883 - DNA, 25 bp, Homo sapien
gacacagaagatgcttccataaaag

SEQ ID NO: 6091884 - DNA, 25 bp, Homo sapien
ggaatcttgagaactgtagtgagga

SEQ ID NO: 6091885 - DNA, 25 bp, Homo sapien
cagagaaagtggtggataacattgg

SEQ ID NO: 6091886 - DNA, 25 bp, Homo sapien
tcacagaaggtgagacgattcagca

SEQ ID NO: 6091887 - DNA, 25 bp, Homo sapien
taaacaattgttgccacgtggtcct

SEQ ID NO: 6091888 - DNA, 25 bp, Homo sapien
ttccataaaagagcgtcaccacggt

SEQ ID NO: 6091889 - DNA, 25 bp, Homo sapien
cacgtggtccttgacagcgtaggtg

SEQ ID NO: 6091890 - DNA, 25 bp, Homo sapien
ggtgggatacacacgtagaaaatgt

SEQ ID NO: 6091891 - DNA, 25 bp, Homo sapien
gaaaatgtcttgtgccggccttcgg

SEQ ID NO: 6091892 - DNA, 25 bp, Homo sapien
tgggatacacacgtagaaaatgtct

SEQ ID NO: 6091893 - DNA, 25 bp, Homo sapien
gaaaactatcgttgtcaccatcatc

SEQ ID NO: 6091894 - DNA, 25 bp, Homo sapien
agtgaggtggaaaactatcgttgtc

SEQ ID NO: 6091895 - DNA, 25 bp, Homo sapien
aaaatgtcttgtgccggccttcggc

SEQ ID NO: 6091896 - DNA, 25 bp, Homo sapien
tgaggtggaaaactatcgttgtcac

SEQ ID NO: 6091897 - DNA, 25 bp, Homo sapien
acagatgatgtcttgttttcacagg

SEQ ID NO: 6091898 - DNA, 25 bp, Homo sapien
agaaagtgaggtggaaaactatcgt

SEQ ID NO: 6091899 - DNA, 25 bp, Homo sapien
tggaaaactatcgttgtcaccatca

SEQ ID NO: 6091900 - DNA, 25 bp, Homo sapien
ggatacacacgtagaaaatgtcttg

SEQ ID NO: 6091901 - DNA, 25 bp, Homo sapien
tagaaaatgtcttgtgccggccttc

SEQ ID NO: 6091902 - DNA, 25 bp, Homo sapien
ggtggccagaagagtacacgagcgc

SEQ ID NO: 6091903 - DNA, 25 bp, Homo sapien
gccagaagagtacacgagcgcccag

SEQ ID NO: 6091904 - DNA, 25 bp, Homo sapien
gtggccagaagagtacacgagcgcc

SEQ ID NO: 6091905 - DNA, 25 bp, Homo sapien
ggccagaagagtacacgagcgccca

SEQ ID NO: 6091906 - DNA, 25 bp, Homo sapien
agcccgaggccactattccaacagt

SEQ ID NO: 6091907 - DNA, 25 bp, Homo sapien
ggccactattccaacagtcacaaaa

SEQ ID NO: 6091908 - DNA, 25 bp, Homo sapien
cactattccaacagtcacaaaaatg

SEQ ID NO: 6091909 - DNA, 25 bp, Homo sapien
gaggccactattccaacagtcacaa

SEQ ID NO: 6091910 - DNA, 25 bp, Homo sapien
cgaggccactattccaacagtcaca

SEQ ID NO: 6091911 - DNA, 25 bp, Homo sapien
tggccagaagagtacacgagcgccc

SEQ ID NO: 6091912 - DNA, 25 bp, Homo sapien
ccagaagagtacacgagcgcccagt

SEQ ID NO: 6091913 - DNA, 25 bp, Homo sapien
cactcggtgccccctaggaagtgaa

SEQ ID NO: 6091914 - DNA, 25 bp, Homo sapien
gaaggaagtaatgaccagctgggca

SEQ ID NO: 6091915 - DNA, 25 bp, Homo sapien
gggatcctcagtattgctgccaaga

SEQ ID NO: 6091916 - DNA, 25 bp, Homo sapien
ctcaagagagtagctggctttgggc

SEQ ID NO: 6091917 - DNA, 25 bp, Homo sapien
cagaaggaagcagttagtacaggcc

SEQ ID NO: 6091918 - DNA, 25 bp, Homo sapien
cagagctgtctgtatagccctattc

SEQ ID NO: 6091919 - DNA, 25 bp, Homo sapien
tacagtataggtcatggcaataagc

SEQ ID NO: 6091920 - DNA, 25 bp, Homo sapien
ccaagaggaccaaaagactgaggat

SEQ ID NO: 6091921 - DNA, 25 bp, Homo sapien
gatcctcagctcactcgggcctgta

SEQ ID NO: 6091922 - DNA, 25 bp, Homo sapien
ctgccaagatgtaggcgtaggagat

SEQ ID NO: 6091923 - DNA, 25 bp, Homo sapien
caaagaggtatccagtcaggaagga

SEQ ID NO: 6091924 - DNA, 25 bp, Homo sapien
tagtgtcattcccagtccaaagagg

SEQ ID NO: 6091925 - DNA, 25 bp, Homo sapien
tcaggtacacgaaggaagcacagcc

SEQ ID NO: 6091926 - DNA, 25 bp, Homo sapien
gaagtgactgaccacgtggtggcca

SEQ ID NO: 6091927 - DNA, 25 bp, Homo sapien
gcaggaagtcttcgctgaccgacgt

SEQ ID NO: 6091928 - DNA, 25 bp, Homo sapien
cagagccggtggctcatgagcacgt

SEQ ID NO: 6091929 - DNA, 25 bp, Homo sapien
tgatggccagtagcaggcactccgt

SEQ ID NO: 6091930 - DNA, 25 bp, Homo sapien
ccaggatgagcaagtaggacaggca

SEQ ID NO: 6091931 - DNA, 25 bp, Homo sapien
tgaccatggcatagaggactgtgaa

SEQ ID NO: 6091932 - DNA, 25 bp, Homo sapien
acgtgttgccgcatgccagcttcag

SEQ ID NO: 6091933 - DNA, 25 bp, Homo sapien
gggcttccttactcttgggcttcaa

SEQ ID NO: 6091934 - DNA, 25 bp, Homo sapien
catgagcacgtggtacctgagtggc

SEQ ID NO: 6091935 - DNA, 25 bp, Homo sapien
tgatggtgccgtagaaaagcagcac

SEQ ID NO: 6091936 - DNA, 25 bp, Homo sapien
aaggctttgcagcacctggcggccg

SEQ ID NO: 6091937 - DNA, 25 bp, Homo sapien
gaaaagcagcactacagccaggtgt

SEQ ID NO: 6091938 - DNA, 25 bp, Homo sapien
tgatgtcttcattacctgaatcaac

SEQ ID NO: 6091939 - DNA, 25 bp, Homo sapien
tgcgtacatgaagaagatggttcca

SEQ ID NO: 6091940 - DNA, 25 bp, Homo sapien
tcaacagaggctttagactcaggct

SEQ ID NO: 6091941 - DNA, 25 bp, Homo sapien
caaaagctgtctgcactactgagtc

SEQ ID NO: 6091942 - DNA, 25 bp, Homo sapien
ggtccagtgccatcgtgcctaagat

SEQ ID NO: 6091943 - DNA, 25 bp, Homo sapien
gaacaatcagattcgaccctgtcat

SEQ ID NO: 6091944 - DNA, 25 bp, Homo sapien
taagcatgggagtcatcactccata

SEQ ID NO: 6091945 - DNA, 25 bp, Homo sapien
tacatccttgtttcgcagactatag

SEQ ID NO: 6091946 - DNA, 25 bp, Homo sapien
gaccctgtcatactaatcacattga

SEQ ID NO: 6091947 - DNA, 25 bp, Homo sapien
ggaatcctcagaatagtggcaacaa

SEQ ID NO: 6091948 - DNA, 25 bp, Homo sapien
tgccatggccacataggcacccttg

SEQ ID NO: 6091949 - DNA, 25 bp, Homo sapien
gacattattagcacagaatggtaac

SEQ ID NO: 6091950 - DNA, 25 bp, Homo sapien
tattagggcacttagggatgccagg

SEQ ID NO: 6091951 - DNA, 25 bp, Homo sapien
aagggatagtgcatggtatacacgg

SEQ ID NO: 6091952 - DNA, 25 bp, Homo sapien
ccatgagctcatatctggaggtatc

SEQ ID NO: 6091953 - DNA, 25 bp, Homo sapien
acacccatcacatataccatgagct

SEQ ID NO: 6091954 - DNA, 25 bp, Homo sapien
cacggtatatattagggcacttagg

SEQ ID NO: 6091955 - DNA, 25 bp, Homo sapien
gcagaagggatagtgcatggtatac

SEQ ID NO: 6091956 - DNA, 25 bp, Homo sapien
cacagagaagatgcctgatctcctg

SEQ ID NO: 6091957 - DNA, 25 bp, Homo sapien
gagtagaatttgtgtataggaggcc

SEQ ID NO: 6091958 - DNA, 25 bp, Homo sapien
gtatacacggtatatattagggcac

SEQ ID NO: 6091959 - DNA, 25 bp, Homo sapien
tgtataggaggccagtatagcagca

SEQ ID NO: 6091960 - DNA, 25 bp, Homo sapien
tagaatttgtgtataggaggccagt

SEQ ID NO: 6091961 - DNA, 25 bp, Homo sapien
taggaggccagtatagcagcaagag

SEQ ID NO: 6091962 - DNA, 25 bp, Homo sapien
catccttattgtggaggctatacac

SEQ ID NO: 6091963 - DNA, 25 bp, Homo sapien
ctgaaggcaaacgtagaatagcggc

SEQ ID NO: 6091964 - DNA, 25 bp, Homo sapien
tgccgtagaggaaaccaaccatggt

SEQ ID NO: 6091965 - DNA, 25 bp, Homo sapien
tatgtcagaacaagaggctcgcaga

SEQ ID NO: 6091966 - DNA, 25 bp, Homo sapien
gcagagtgcacccttgacatcctta

SEQ ID NO: 6091967 - DNA, 25 bp, Homo sapien
tagtaagcaggcacaccgttggtga

SEQ ID NO: 6091968 - DNA, 25 bp, Homo sapien
tagcggccccaattcggacataaga

SEQ ID NO: 6091969 - DNA, 25 bp, Homo sapien
gctatacacaaatgggttggccaaa

SEQ ID NO: 6091970 - DNA, 25 bp, Homo sapien
cacccagctcaaggctagtaagcag

SEQ ID NO: 6091971 - DNA, 25 bp, Homo sapien
cgcaacatggtgtgcagtatggaca

SEQ ID NO: 6091972 - DNA, 25 bp, Homo sapien
aagtggccggtggtcacaaaagaag

SEQ ID NO: 6091973 - DNA, 25 bp, Homo sapien
gaagccaccatgtcctgatactgag

SEQ ID NO: 6091974 - DNA, 25 bp, Homo sapien
gccatcacaacgaggaggaacatct

SEQ ID NO: 6091975 - DNA, 25 bp, Homo sapien
taagggctacttgtacaatggaatg

SEQ ID NO: 6091976 - DNA, 25 bp, Homo sapien
accacaaaggtattggtgcaggcca

SEQ ID NO: 6091977 - DNA, 25 bp, Homo sapien
agatgacagtatggaaaagagaaac

SEQ ID NO: 6091978 - DNA, 25 bp, Homo sapien
ccttatacgacagaggatgactgca

SEQ ID NO: 6091979 - DNA, 25 bp, Homo sapien
gggcaagtgtagatgaaaatagcag

SEQ ID NO: 6091980 - DNA, 25 bp, Homo sapien
ccaacgataatgcatagcaggctct

SEQ ID NO: 6091981 - DNA, 25 bp, Homo sapien
ttgcgaagcgtataaataacagggt

SEQ ID NO: 6091982 - DNA, 25 bp, Homo sapien
ggtgcatgtggaaatagccttgctc

SEQ ID NO: 6091983 - DNA, 25 bp, Homo sapien
gaggagtgctcccttatacgacaga

SEQ ID NO: 6091984 - DNA, 25 bp, Homo sapien
cccaagccacagaaccaacgataat

SEQ ID NO: 6091985 - DNA, 25 bp, Homo sapien
tctcccgctccaagaaaatgcaaga

SEQ ID NO: 6091986 - DNA, 25 bp, Homo sapien
gagagcctgaaagtgttcccagtat

SEQ ID NO: 6091987 - DNA, 25 bp, Homo sapien
tatggccaggcaagcacatacattt

SEQ ID NO: 6091988 - DNA, 25 bp, Homo sapien
cccatgaaatggctggagttaggtc

SEQ ID NO: 6091989 - DNA, 25 bp, Homo sapien
ccaggatagaaaagaggtcattgaa

SEQ ID NO: 6091990 - DNA, 25 bp, Homo sapien
tcaactacattggatctacagaagg

SEQ ID NO: 6091991 - DNA, 25 bp, Homo sapien
tccttcaggtgagcgcatcttcatg

SEQ ID NO: 6091992 - DNA, 25 bp, Homo sapien
aggccttctggcgtccttcaggtga

SEQ ID NO: 6091993 - DNA, 25 bp, Homo sapien
cactgatgtagttgtctgaacatga

SEQ ID NO: 6091994 - DNA, 25 bp, Homo sapien
gttcccagtatgaatggatgcattc

SEQ ID NO: 6091995 - DNA, 25 bp, Homo sapien
gctggagttaggtcgtaagtacata

SEQ ID NO: 6091996 - DNA, 25 bp, Homo sapien
cgtaagtacataaagattcctgtcc

SEQ ID NO: 6091997 - DNA, 25 bp, Homo sapien
ggagatcaagattaccaggatagaa

SEQ ID NO: 6091998 - DNA, 25 bp, Homo sapien
gaaggtgcatcagaccctggcttta

SEQ ID NO: 6091999 - DNA, 25 bp, Homo sapien
gaacaagtgagctttagtagggcag

SEQ ID NO: 6092000 - DNA, 25 bp, Homo sapien
tccagctgtgtacaagagtcccaag

SEQ ID NO: 6092001 - DNA, 25 bp, Homo sapien
gaaaatgcataacagaccccaatgg

SEQ ID NO: 6092002 - DNA, 25 bp, Homo sapien
cactgacactaatgatggcatgttc

SEQ ID NO: 6092003 - DNA, 25 bp, Homo sapien
aggacagagccatcaactggacaca

SEQ ID NO: 6092004 - DNA, 25 bp, Homo sapien
ccacaggactttactcagagcggat

SEQ ID NO: 6092005 - DNA, 25 bp, Homo sapien
gcagggacatcgcagaagaactgat

SEQ ID NO: 6092006 - DNA, 25 bp, Homo sapien
ccagcaagtctagaatagaaggtgc

SEQ ID NO: 6092007 - DNA, 25 bp, Homo sapien
gtgaggcacacagttggaaaaggct

SEQ ID NO: 6092008 - DNA, 25 bp, Homo sapien
tcaaggttggaggtgcgacagaata

SEQ ID NO: 6092009 - DNA, 25 bp, Homo sapien
tgacaacaatgaggtgaggcacaca

SEQ ID NO: 6092010 - DNA, 25 bp, Homo sapien
gcagccggccatgtacctgtcaaag

SEQ ID NO: 6092011 - DNA, 25 bp, Homo sapien
agagatgagccgaacacacacagtc

SEQ ID NO: 6092012 - DNA, 25 bp, Homo sapien
cagtgggtctcctgagatacatgaa

SEQ ID NO: 6092013 - DNA, 25 bp, Homo sapien
tgaggaccaccgagagggaatatgt

SEQ ID NO: 6092014 - DNA, 25 bp, Homo sapien
taggctgacagagaatccatagaca

SEQ ID NO: 6092015 - DNA, 25 bp, Homo sapien
tagaaacagccgtcaagtgggaccc

SEQ ID NO: 6092016 - DNA, 25 bp, Homo sapien
cagagcgcatgcgtagcacagctac

SEQ ID NO: 6092017 - DNA, 25 bp, Homo sapien
ccatagtgtgcatattaggctgaca

SEQ ID NO: 6092018 - DNA, 25 bp, Homo sapien
cccacaggcaatctggatgagaggg

SEQ ID NO: 6092019 - DNA, 25 bp, Homo sapien
tgatttctttgatgtgcactctccc

SEQ ID NO: 6092020 - DNA, 25 bp, Homo sapien
cctccacgtggacaacggcaatgaa

SEQ ID NO: 6092021 - DNA, 25 bp, Homo sapien
tccatagacataaggcacagagatg

SEQ ID NO: 6092022 - DNA, 25 bp, Homo sapien
tgaggatgaataagtaagagatgat

SEQ ID NO: 6092023 - DNA, 25 bp, Homo sapien
catgaagatcagagtaccatagaat

SEQ ID NO: 6092024 - DNA, 25 bp, Homo sapien
ccattttgatgagaggtggatctgc

SEQ ID NO: 6092025 - DNA, 25 bp, Homo sapien
tgctgagcgcattcgcagaatggca

SEQ ID NO: 6092026 - DNA, 25 bp, Homo sapien
tctgctgagcgcattcgcagaatgg

SEQ ID NO: 6092027 - DNA, 25 bp, Homo sapien
gaaagtaatcagtcgaatacagaca

SEQ ID NO: 6092028 - DNA, 25 bp, Homo sapien
ttccttctgctgagcgcattcgcag

SEQ ID NO: 6092029 - DNA, 25 bp, Homo sapien
gagcgcattcgcagaatggcaatga

SEQ ID NO: 6092030 - DNA, 25 bp, Homo sapien
cattcgcagaatggcaatgaggatg

SEQ ID NO: 6092031 - DNA, 25 bp, Homo sapien
caggccattttgatgagaggtggat

SEQ ID NO: 6092032 - DNA, 25 bp, Homo sapien
tgaagatcagagtaccatagaatat

SEQ ID NO: 6092033 - DNA, 25 bp, Homo sapien
gcacaggccattttgatgagaggtg

SEQ ID NO: 6092034 - DNA, 25 bp, Homo sapien
ggatccttaggatagcggcaataat

SEQ ID NO: 6092035 - DNA, 25 bp, Homo sapien
taaagatcagtgtgccatagaaaat

SEQ ID NO: 6092036 - DNA, 25 bp, Homo sapien
gactcttcttgacatcagtgttgaa

SEQ ID NO: 6092037 - DNA, 25 bp, Homo sapien
gcccctgagtagagcggatccttag

SEQ ID NO: 6092038 - DNA, 25 bp, Homo sapien
tttgtgttgcccctgagtagagcgg

SEQ ID NO: 6092039 - DNA, 25 bp, Homo sapien
gacagtcaccatatgggagccacag

SEQ ID NO: 6092040 - DNA, 25 bp, Homo sapien
ctgtaggtacataaagatcagtgtg

SEQ ID NO: 6092041 - DNA, 25 bp, Homo sapien
tatatatatggaactgccaccagtt

SEQ ID NO: 6092042 - DNA, 25 bp, Homo sapien
tatccaaggctttctttgaggcatc

SEQ ID NO: 6092043 - DNA, 25 bp, Homo sapien
taagtcagacggaaagtgataacgg

SEQ ID NO: 6092044 - DNA, 25 bp, Homo sapien
aagtttgggccacagtaagtcagac

SEQ ID NO: 6092045 - DNA, 25 bp, Homo sapien
ataacggtgtggaagagggcaacca

SEQ ID NO: 6092046 - DNA, 25 bp, Homo sapien
ccagatttgtcgagtctttacacag

SEQ ID NO: 6092047 - DNA, 25 bp, Homo sapien
aaatggaatcactaagagaatgctc

SEQ ID NO: 6092048 - DNA, 25 bp, Homo sapien
gaagaagccatagatgacattggtc

SEQ ID NO: 6092049 - DNA, 25 bp, Homo sapien
caaccctgttgctagtgaggataga

SEQ ID NO: 6092050 - DNA, 25 bp, Homo sapien
tatcttaagggattgtgaatggcaa

SEQ ID NO: 6092051 - DNA, 25 bp, Homo sapien
gctcctaatggctaaaataagtccc

SEQ ID NO: 6092052 - DNA, 25 bp, Homo sapien
tatcctgatgaagacagtatgagtg

SEQ ID NO: 6092053 - DNA, 25 bp, Homo sapien
aggccagcttcatggtatcctgatg

SEQ ID NO: 6092054 - DNA, 25 bp, Homo sapien
tctctgccaaagatgcaatgctgag

SEQ ID NO: 6092055 - DNA, 25 bp, Homo sapien
tctccttaaggtgaagggaaatgga

SEQ ID NO: 6092056 - DNA, 25 bp, Homo sapien
caataaggatcacaacaagagggct

SEQ ID NO: 6092057 - DNA, 25 bp, Homo sapien
cattggtcttgttgtcagagcaggc

SEQ ID NO: 6092058 - DNA, 25 bp, Homo sapien
gaagatgataactgataaacccaca

SEQ ID NO: 6092059 - DNA, 25 bp, Homo sapien
gataactgataaacccacaataaac

SEQ ID NO: 6092060 - DNA, 25 bp, Homo sapien
agaagagcaattgaatgagcagaag

SEQ ID NO: 6092061 - DNA, 25 bp, Homo sapien
tgataaacccacaataaacaacaca

SEQ ID NO: 6092062 - DNA, 25 bp, Homo sapien
ggaagatgataactgataaacccac

SEQ ID NO: 6092063 - DNA, 25 bp, Homo sapien
gataaacccacaataaacaacacaa

SEQ ID NO: 6092064 - DNA, 25 bp, Homo sapien
ataaacccacaataaacaacacaag

SEQ ID NO: 6092065 - DNA, 25 bp, Homo sapien
gggaagatgataactgataaaccca

SEQ ID NO: 6092066 - DNA, 25 bp, Homo sapien
actgataaacccacaataaacaaca

SEQ ID NO: 6092067 - DNA, 25 bp, Homo sapien
aggggaagatgataactgataaacc

SEQ ID NO: 6092068 - DNA, 25 bp, Homo sapien
tgataactgataaacccacaataaa

SEQ ID NO: 6092069 - DNA, 25 bp, Homo sapien
gaagagcaattgaatgagcagaagg

SEQ ID NO: 6092070 - DNA, 25 bp, Homo sapien
cattcttttgctcatgcggatggga

SEQ ID NO: 6092071 - DNA, 25 bp, Homo sapien
tgatggccctggattggcaataagg

SEQ ID NO: 6092072 - DNA, 25 bp, Homo sapien
tagatgccaaaagtagtgcttctgc

SEQ ID NO: 6092073 - DNA, 25 bp, Homo sapien
tgtcctctgttggagatcgcaggga

SEQ ID NO: 6092074 - DNA, 25 bp, Homo sapien
cgatcataggccatagatgccaaaa

SEQ ID NO: 6092075 - DNA, 25 bp, Homo sapien
cagatttcatgtggtagacagcaag

SEQ ID NO: 6092076 - DNA, 25 bp, Homo sapien
tgtgagcacaagcattgatcgagcc

SEQ ID NO: 6092077 - DNA, 25 bp, Homo sapien
tgaaatagcaatgaagggaaacacg

SEQ ID NO: 6092078 - DNA, 25 bp, Homo sapien
tcgcagggatcttggacgtagataa

SEQ ID NO: 6092079 - DNA, 25 bp, Homo sapien
ggagaacccggccataggaacatga

SEQ ID NO: 6092080 - DNA, 25 bp, Homo sapien
gagcctatgatccaagaccctgtta

SEQ ID NO: 6092081 - DNA, 25 bp, Homo sapien
caaaaggtgcatagtagaaagttac

SEQ ID NO: 6092082 - DNA, 25 bp, Homo sapien
gaaggcagtcataagtccacaaatt

SEQ ID NO: 6092083 - DNA, 25 bp, Homo sapien
tctccagatcccatgtgaatgacag

SEQ ID NO: 6092084 - DNA, 25 bp, Homo sapien
tattgatgtgtcattgcatgagagg

SEQ ID NO: 6092085 - DNA, 25 bp, Homo sapien
catgagattggtgtatcttagaggg

SEQ ID NO: 6092086 - DNA, 25 bp, Homo sapien
tatttcccgagacccacagtaggag

SEQ ID NO: 6092087 - DNA, 25 bp, Homo sapien
caacagaaagcattcggagccaagc

SEQ ID NO: 6092088 - DNA, 25 bp, Homo sapien
gacccacagtaggagaaggaaaatg

SEQ ID NO: 6092089 - DNA, 25 bp, Homo sapien
ggaaaatgtcgctacagcatcaatg

SEQ ID NO: 6092090 - DNA, 25 bp, Homo sapien
gaagtgggctatttcccgagaccca

SEQ ID NO: 6092091 - DNA, 25 bp, Homo sapien
ggtcataagacataacagccaacag

SEQ ID NO: 6092092 - DNA, 25 bp, Homo sapien
cataagtccacaaattttgggtctc

SEQ ID NO: 6092093 - DNA, 25 bp, Homo sapien
gccagaataactcgagcataggaag

SEQ ID NO: 6092094 - DNA, 25 bp, Homo sapien
tcttgcgggcttctgtagagcgcat

SEQ ID NO: 6092095 - DNA, 25 bp, Homo sapien
cagcagatgtacatggcgttttcga

SEQ ID NO: 6092096 - DNA, 25 bp, Homo sapien
cgttttcgaagactgaagtgtcagc

SEQ ID NO: 6092097 - DNA, 25 bp, Homo sapien
caaaggccttcttgcgggcttctgt

SEQ ID NO: 6092098 - DNA, 25 bp, Homo sapien
tgcaccgcaatatgggaagctcagg

SEQ ID NO: 6092099 - DNA, 25 bp, Homo sapien
tgatcgatctcgtgtgcaccgcaat

SEQ ID NO: 6092100 - DNA, 25 bp, Homo sapien
gaagctcagggtagcaacagcctgc

SEQ ID NO: 6092101 - DNA, 25 bp, Homo sapien
ccaggagcattaacacacagcagat

SEQ ID NO: 6092102 - DNA, 25 bp, Homo sapien
ctcgcagaagaagtgatcgatctcg

SEQ ID NO: 6092103 - DNA, 25 bp, Homo sapien
agtgtcagcacaagccaaacgcacc

SEQ ID NO: 6092104 - DNA, 25 bp, Homo sapien
gaacagcagcgaggatgagaccata

SEQ ID NO: 6092105 - DNA, 25 bp, Homo sapien
gggatttgggtctcatataggtaaa

SEQ ID NO: 6092106 - DNA, 25 bp, Homo sapien
tattcttcagcgtgtaaatcacagg

SEQ ID NO: 6092107 - DNA, 25 bp, Homo sapien
taaccacataggtttctgaacaggc

SEQ ID NO: 6092108 - DNA, 25 bp, Homo sapien
gaactaaagaatgcacacaggatcc

SEQ ID NO: 6092109 - DNA, 25 bp, Homo sapien
tgacataggagaatattagcatgac

SEQ ID NO: 6092110 - DNA, 25 bp, Homo sapien
ccaggagtaggttaaccacataggt

SEQ ID NO: 6092111 - DNA, 25 bp, Homo sapien
aaaacaccacagacccactggctta

SEQ ID NO: 6092112 - DNA, 25 bp, Homo sapien
tggccccactattggaaaccaggag

SEQ ID NO: 6092113 - DNA, 25 bp, Homo sapien
cccactggcttatgatggtcatgta

SEQ ID NO: 6092114 - DNA, 25 bp, Homo sapien
cacatagcggtcaacagccgtgagg

SEQ ID NO: 6092115 - DNA, 25 bp, Homo sapien
tctcagagaatgcaagaagatgaca

SEQ ID NO: 6092116 - DNA, 25 bp, Homo sapien
tctgaacaggcttgtttcaacaagg

SEQ ID NO: 6092117 - DNA, 25 bp, Homo sapien
tattagcatgacataactcactgca

SEQ ID NO: 6092118 - DNA, 25 bp, Homo sapien
tgccatcaccgaaagagaaaataca

SEQ ID NO: 6092119 - DNA, 25 bp, Homo sapien
tctgtatgggccagtttgaggaccc

SEQ ID NO: 6092120 - DNA, 25 bp, Homo sapien
tgtgagcccaatgcaatggtctcta

SEQ ID NO: 6092121 - DNA, 25 bp, Homo sapien
tacatccacccctccaataaggtgg

SEQ ID NO: 6092122 - DNA, 25 bp, Homo sapien
ccagtttgaggacccggtggacatc

SEQ ID NO: 6092123 - DNA, 25 bp, Homo sapien
tatgactatgtaggacaccaggagc

SEQ ID NO: 6092124 - DNA, 25 bp, Homo sapien
tgataatatgactatgtaggacacc

SEQ ID NO: 6092125 - DNA, 25 bp, Homo sapien
gagatggccacatatcgatccaatg

SEQ ID NO: 6092126 - DNA, 25 bp, Homo sapien
gcagccactgtgagcccaatgcaat

SEQ ID NO: 6092127 - DNA, 25 bp, Homo sapien
caagtatgaaaatgtctgtatgggc

SEQ ID NO: 6092128 - DNA, 25 bp, Homo sapien
gatccaatgccatcaccgaaagaga

SEQ ID NO: 6092129 - DNA, 25 bp, Homo sapien
aatggtctctactcatgatagtcgc

SEQ ID NO: 6092130 - DNA, 25 bp, Homo sapien
taaaccacagggtagtgaccaggcc

SEQ ID NO: 6092131 - DNA, 25 bp, Homo sapien
cagggtagtgaccaggccattgttg

SEQ ID NO: 6092132 - DNA, 25 bp, Homo sapien
gggcagtgcattgccctctactcat

SEQ ID NO: 6092133 - DNA, 25 bp, Homo sapien
gacctgggggacatcgcagtagaaa

SEQ ID NO: 6092134 - DNA, 25 bp, Homo sapien
tgagacctcagcgtcattaggatga

SEQ ID NO: 6092135 - DNA, 25 bp, Homo sapien
tcagtgcaagtgagtttgaggacct

SEQ ID NO: 6092136 - DNA, 25 bp, Homo sapien
tgtctgccccaccaaggaggtggaa

SEQ ID NO: 6092137 - DNA, 25 bp, Homo sapien
gacctcagcgtcattaggatgactg

SEQ ID NO: 6092138 - DNA, 25 bp, Homo sapien
gtgcattgccctctactcatgatgg

SEQ ID NO: 6092139 - DNA, 25 bp, Homo sapien
tcctgcctgagacctcagcgtcatt

SEQ ID NO: 6092140 - DNA, 25 bp, Homo sapien
gaaaaaatgtctgccccaccaagga

SEQ ID NO: 6092141 - DNA, 25 bp, Homo sapien
ggaagataaaccacagggtagtgac

SEQ ID NO: 6092142 - DNA, 25 bp, Homo sapien
caatgacaaataattccagggtgta

SEQ ID NO: 6092143 - DNA, 25 bp, Homo sapien
tcgcaaacccctttagcagcttgtg

SEQ ID NO: 6092144 - DNA, 25 bp, Homo sapien
cagacaatgtggacagcgccttgga

SEQ ID NO: 6092145 - DNA, 25 bp, Homo sapien
taaatactcggattcagtaagggtg

SEQ ID NO: 6092146 - DNA, 25 bp, Homo sapien
gcgccttggagagcccatgtgatga

SEQ ID NO: 6092147 - DNA, 25 bp, Homo sapien
tattgcttgccaaactactgaatgg

SEQ ID NO: 6092148 - DNA, 25 bp, Homo sapien
acactgaccaggatgacaatgtaag

SEQ ID NO: 6092149 - DNA, 25 bp, Homo sapien
ccagggtgtatgtttcaatgcaagc

SEQ ID NO: 6092150 - DNA, 25 bp, Homo sapien
tctggcttatggagtgtaaaaaacc

SEQ ID NO: 6092151 - DNA, 25 bp, Homo sapien
ggtgaaagagagcagcccgctgtca

SEQ ID NO: 6092152 - DNA, 25 bp, Homo sapien
ggctcatgattgtcctatagtgcag

SEQ ID NO: 6092153 - DNA, 25 bp, Homo sapien
tatccatgaaagtatcgcaaacccc

SEQ ID NO: 6092154 - DNA, 25 bp, Homo sapien
gaagatgccaggtccaaacatgaag

SEQ ID NO: 6092155 - DNA, 25 bp, Homo sapien
ggccatcacaacaaggagtaatccc

SEQ ID NO: 6092156 - DNA, 25 bp, Homo sapien
gatgccaggtccaaacatgaagaat

SEQ ID NO: 6092157 - DNA, 25 bp, Homo sapien
tcatcaggccactgttgaagaccat

SEQ ID NO: 6092158 - DNA, 25 bp, Homo sapien
catcacaacaaggagtaatccctcc

SEQ ID NO: 6092159 - DNA, 25 bp, Homo sapien
gaagaatataacaatgatatgggtg

SEQ ID NO: 6092160 - DNA, 25 bp, Homo sapien
gtgtcatcaggccactgttgaagac

SEQ ID NO: 6092161 - DNA, 25 bp, Homo sapien
ctcgtatgcgacaaagaatgactgc

SEQ ID NO: 6092162 - DNA, 25 bp, Homo sapien
catgaagaatataacaatgatatgg

SEQ ID NO: 6092163 - DNA, 25 bp, Homo sapien
ccacaaaaaggcaagcggaggatga

SEQ ID NO: 6092164 - DNA, 25 bp, Homo sapien
tggacatggccttgttttttgcctc

SEQ ID NO: 6092165 - DNA, 25 bp, Homo sapien
aaaggccatcacaacaaggagtaat

SEQ ID NO: 6092166 - DNA, 25 bp, Homo sapien
cagtggccatgacagaacgcagaat

SEQ ID NO: 6092167 - DNA, 25 bp, Homo sapien
gtacagccaggatatgtgacacaca

SEQ ID NO: 6092168 - DNA, 25 bp, Homo sapien
ctgtggagaccccaatcattggcac

SEQ ID NO: 6092169 - DNA, 25 bp, Homo sapien
ttcctcacgggaagcagtggccatg

SEQ ID NO: 6092170 - DNA, 25 bp, Homo sapien
tcccaaagcggtgcactgtggagac

SEQ ID NO: 6092171 - DNA, 25 bp, Homo sapien
tgagcacagttgcatagcgcaaggg

SEQ ID NO: 6092172 - DNA, 25 bp, Homo sapien
cattggatctgcagataggcagcct

SEQ ID NO: 6092173 - DNA, 25 bp, Homo sapien
ccatgccaaaggtggatacaagaac

SEQ ID NO: 6092174 - DNA, 25 bp, Homo sapien
aaagggtgatgaagcttcgagcagc

SEQ ID NO: 6092175 - DNA, 25 bp, Homo sapien
gcacaggaggcacaaataggtacac

SEQ ID NO: 6092176 - DNA, 25 bp, Homo sapien
caggcaagcctcatcatgtctgggt

SEQ ID NO: 6092177 - DNA, 25 bp, Homo sapien
ttgtcttggcgctataaatgagagg

SEQ ID NO: 6092178 - DNA, 25 bp, Homo sapien
aatggatgggaaagctcgtgacccc

SEQ ID NO: 6092179 - DNA, 25 bp, Homo sapien
tatttgatcacttctgggtggtagc

SEQ ID NO: 6092180 - DNA, 25 bp, Homo sapien
gaataaacaatacgtcagtgccatt

SEQ ID NO: 6092181 - DNA, 25 bp, Homo sapien
tgttgcttctttcgggccacaatgc

SEQ ID NO: 6092182 - DNA, 25 bp, Homo sapien
agatgaccagccctatcaccaggac

SEQ ID NO: 6092183 - DNA, 25 bp, Homo sapien
caaaaactgctgatccaaggtttgg

SEQ ID NO: 6092184 - DNA, 25 bp, Homo sapien
accccatgaacccttggattggagc

SEQ ID NO: 6092185 - DNA, 25 bp, Homo sapien
cagctggaacatagcctggcggatt

SEQ ID NO: 6092186 - DNA, 25 bp, Homo sapien
tacagatagccacgaagcggtcaaa

SEQ ID NO: 6092187 - DNA, 25 bp, Homo sapien
cagaacagtacggaggatcaggaca

SEQ ID NO: 6092188 - DNA, 25 bp, Homo sapien
aatattggccaaagtgctacagagc

SEQ ID NO: 6092189 - DNA, 25 bp, Homo sapien
catcctgtctgtgaggatagtagca

SEQ ID NO: 6092190 - DNA, 25 bp, Homo sapien
gctaggccaatgtgttcacaaaagg

SEQ ID NO: 6092191 - DNA, 25 bp, Homo sapien
tggcaagcatctggagaaggcatgt

SEQ ID NO: 6092192 - DNA, 25 bp, Homo sapien
gaccaccgtcgacattagaatggaa

SEQ ID NO: 6092193 - DNA, 25 bp, Homo sapien
aatgggattcagcataggtggagcc

SEQ ID NO: 6092194 - DNA, 25 bp, Homo sapien
gatgatgatgcagacatgggagcca

SEQ ID NO: 6092195 - DNA, 25 bp, Homo sapien
gaatgtggcgtccaaacctctgggt

SEQ ID NO: 6092196 - DNA, 25 bp, Homo sapien
tctgggtaaggattgtgaagatgcc

SEQ ID NO: 6092197 - DNA, 25 bp, Homo sapien
cattacatgcatatttggctaggcc

SEQ ID NO: 6092198 - DNA, 25 bp, Homo sapien
ctcagtgggtagcatatggcaatat

SEQ ID NO: 6092199 - DNA, 25 bp, Homo sapien
tagtacaacatctaagaccaccgtc

SEQ ID NO: 6092200 - DNA, 25 bp, Homo sapien
gaagatgccagacccataaaagagg

SEQ ID NO: 6092201 - DNA, 25 bp, Homo sapien
catgggagccaaatgtgttgagagc

SEQ ID NO: 6092202 - DNA, 25 bp, Homo sapien
cttcatgagtaggaagacggaaaac

SEQ ID NO: 6092203 - DNA, 25 bp, Homo sapien
gcgctatattggagtggattgcaga

SEQ ID NO: 6092204 - DNA, 25 bp, Homo sapien
taagaagtatagagggaatgacgaa

SEQ ID NO: 6092205 - DNA, 25 bp, Homo sapien
ctgagggacttgagtcgggcttcat

SEQ ID NO: 6092206 - DNA, 25 bp, Homo sapien
gaagggcaaccgcaatataagaagt

SEQ ID NO: 6092207 - DNA, 25 bp, Homo sapien
tgagtaggaagacggaaaacagcac

SEQ ID NO: 6092208 - DNA, 25 bp, Homo sapien
acatagctgtcataagccattgcca

SEQ ID NO: 6092209 - DNA, 25 bp, Homo sapien
gctggcacaagatagatgagcaaga

SEQ ID NO: 6092210 - DNA, 25 bp, Homo sapien
cttgagtcgggcttcatgagtagga

SEQ ID NO: 6092211 - DNA, 25 bp, Homo sapien
gggcaaccgcaatataagaagtata

SEQ ID NO: 6092212 - DNA, 25 bp, Homo sapien
atggcgctatattggagtggattgc

SEQ ID NO: 6092213 - DNA, 25 bp, Homo sapien
gaatgacgaaaattaaagccctcac

SEQ ID NO: 6092214 - DNA, 25 bp, Homo sapien
gaaatgtcaatgtatcccactgaga

SEQ ID NO: 6092215 - DNA, 25 bp, Homo sapien
cacaataggtatgagggataatccg

SEQ ID NO: 6092216 - DNA, 25 bp, Homo sapien
aatgatgactatgcccagaatggct

SEQ ID NO: 6092217 - DNA, 25 bp, Homo sapien
tatagcgatctatgcccgtgactgt

SEQ ID NO: 6092218 - DNA, 25 bp, Homo sapien
cacatacagattggccagaagaatg

SEQ ID NO: 6092219 - DNA, 25 bp, Homo sapien
tcggaggatctggacataggaaaat

SEQ ID NO: 6092220 - DNA, 25 bp, Homo sapien
caagctaactttgccaagcccatgt

SEQ ID NO: 6092221 - DNA, 25 bp, Homo sapien
gactgtcagtaccacagactccagg

SEQ ID NO: 6092222 - DNA, 25 bp, Homo sapien
tagaaagccaacataacacagacgt

SEQ ID NO: 6092223 - DNA, 25 bp, Homo sapien
gtaaggatcatgctatatctcaggg

SEQ ID NO: 6092224 - DNA, 25 bp, Homo sapien
taacacagacgtgagagccacatgt

SEQ ID NO: 6092225 - DNA, 25 bp, Homo sapien
ggataatccggacaccacagaaagg

SEQ ID NO: 6092226 - DNA, 25 bp, Homo sapien
aaatacacagactctgctctcgtat

SEQ ID NO: 6092227 - DNA, 25 bp, Homo sapien
aatacacagactctgctctcgtatc

SEQ ID NO: 6092228 - DNA, 25 bp, Homo sapien
gcaaatacacagactctgctctcgt

SEQ ID NO: 6092229 - DNA, 25 bp, Homo sapien
caaatacacagactctgctctcgta

SEQ ID NO: 6092230 - DNA, 25 bp, Homo sapien
atacacagactctgctctcgtatct

SEQ ID NO: 6092231 - DNA, 25 bp, Homo sapien
ggccaccaatacgatgctctccatg

SEQ ID NO: 6092232 - DNA, 25 bp, Homo sapien
cactgtctccctaatatgtttggtt

SEQ ID NO: 6092233 - DNA, 25 bp, Homo sapien
tagaggatcctgatatgggagagaa

SEQ ID NO: 6092234 - DNA, 25 bp, Homo sapien
ctccctaatatgtttggttctgacc

SEQ ID NO: 6092235 - DNA, 25 bp, Homo sapien
caaccacatatagattagccaagaa

SEQ ID NO: 6092236 - DNA, 25 bp, Homo sapien
agacagcatagaggatcctgatatg

SEQ ID NO: 6092237 - DNA, 25 bp, Homo sapien
ggttctgaccccatagattacagga

SEQ ID NO: 6092238 - DNA, 25 bp, Homo sapien
tatcatggccaaagcagtgtgtaaa

SEQ ID NO: 6092239 - DNA, 25 bp, Homo sapien
gagaataataaggagcacatccaat

SEQ ID NO: 6092240 - DNA, 25 bp, Homo sapien
aatgaccatgtacaagctcctcagg

SEQ ID NO: 6092241 - DNA, 25 bp, Homo sapien
caccagtggaatgaccatgtacaag

SEQ ID NO: 6092242 - DNA, 25 bp, Homo sapien
ggaacaaccacatatagattagcca

SEQ ID NO: 6092243 - DNA, 25 bp, Homo sapien
gagccagtgatacccagaatatcca

SEQ ID NO: 6092244 - DNA, 25 bp, Homo sapien
tgaaagtgccagaccatataagttg

SEQ ID NO: 6092245 - DNA, 25 bp, Homo sapien
caaaagcacacctgattccatggca

SEQ ID NO: 6092246 - DNA, 25 bp, Homo sapien
gtagtgcagtggacgccctattgcc

SEQ ID NO: 6092247 - DNA, 25 bp, Homo sapien
caccagcagtgggaaaggtacaaca

SEQ ID NO: 6092248 - DNA, 25 bp, Homo sapien
catgtgtgcacaataggtatggcct

SEQ ID NO: 6092249 - DNA, 25 bp, Homo sapien
ctattgccgcagcacgatcacaggc

SEQ ID NO: 6092250 - DNA, 25 bp, Homo sapien
tgcagcacagcatgggcaatgagtc

SEQ ID NO: 6092251 - DNA, 25 bp, Homo sapien
gagaccaggtatgtagaaggccaga

SEQ ID NO: 6092252 - DNA, 25 bp, Homo sapien
gaaaggtacaacaatagccacagct

SEQ ID NO: 6092253 - DNA, 25 bp, Homo sapien
gccacagctttcagtgccagggcca

SEQ ID NO: 6092254 - DNA, 25 bp, Homo sapien
taagttggtggcctgtgtgttaccc

SEQ ID NO: 6092255 - DNA, 25 bp, Homo sapien
agggcatccatagtgctcatgaaca

SEQ ID NO: 6092256 - DNA, 25 bp, Homo sapien
gatttcaacgtttttgcagaaggac

SEQ ID NO: 6092257 - DNA, 25 bp, Homo sapien
atggagagaagaatcagcaagcccc

SEQ ID NO: 6092258 - DNA, 25 bp, Homo sapien
aaggacagctgcaataccatcagac

SEQ ID NO: 6092259 - DNA, 25 bp, Homo sapien
tcatgaggactgtgtacctcagtgg

SEQ ID NO: 6092260 - DNA, 25 bp, Homo sapien
catcatttgagggaccacagtgtac

SEQ ID NO: 6092261 - DNA, 25 bp, Homo sapien
gccacagcagtaattcgggaagact

SEQ ID NO: 6092262 - DNA, 25 bp, Homo sapien
catcagactctgaaccagggcatcc

SEQ ID NO: 6092263 - DNA, 25 bp, Homo sapien
gaacgacttcacagaagaacaaagg

SEQ ID NO: 6092264 - DNA, 25 bp, Homo sapien
taattcgggaagactcagcaacagc

SEQ ID NO: 6092265 - DNA, 25 bp, Homo sapien
gaactaatgtacaccccaaaagctg

SEQ ID NO: 6092266 - DNA, 25 bp, Homo sapien
gcgagcttgatgacctgaacgactt

SEQ ID NO: 6092267 - DNA, 25 bp, Homo sapien
tgtcatgaatctctgtagagcagtc

SEQ ID NO: 6092268 - DNA, 25 bp, Homo sapien
tgccatcatatgtgaagcacaggta

SEQ ID NO: 6092269 - DNA, 25 bp, Homo sapien
aagacacagagaatacataagatga

SEQ ID NO: 6092270 - DNA, 25 bp, Homo sapien
acatgaatagcaatgtcccataaaa

SEQ ID NO: 6092271 - DNA, 25 bp, Homo sapien
atataaagacaactgtttctggtaa

SEQ ID NO: 6092272 - DNA, 25 bp, Homo sapien
gatactagaactataatcaaggaac

SEQ ID NO: 6092273 - DNA, 25 bp, Homo sapien
catgaatagcaatgtcccataaaaa

SEQ ID NO: 6092274 - DNA, 25 bp, Homo sapien
gactgccatcatatgtgaagcacag

SEQ ID NO: 6092275 - DNA, 25 bp, Homo sapien
tgtgactgccatcatatgtgaagca

SEQ ID NO: 6092276 - DNA, 25 bp, Homo sapien
catgaatctctgtagagcagtcttc

SEQ ID NO: 6092277 - DNA, 25 bp, Homo sapien
catcatatgtgaagcacaggtagaa

SEQ ID NO: 6092278 - DNA, 25 bp, Homo sapien
tgaatggttacttcggggctgcaca

SEQ ID NO: 6092279 - DNA, 25 bp, Homo sapien
gtcgtaggacatggctgagagaata

SEQ ID NO: 6092280 - DNA, 25 bp, Homo sapien
catgattactgtgtatagcagaggg

SEQ ID NO: 6092281 - DNA, 25 bp, Homo sapien
ggaagccactttatcagtgtcaaag

SEQ ID NO: 6092282 - DNA, 25 bp, Homo sapien
taagggattgctaccagcacctgac

SEQ ID NO: 6092283 - DNA, 25 bp, Homo sapien
aacaaagggagactgtcacagtaga

SEQ ID NO: 6092284 - DNA, 25 bp, Homo sapien
gacatacccttcgtgacatgattac

SEQ ID NO: 6092285 - DNA, 25 bp, Homo sapien
gacttgggctgcacgtacatgaaaa

SEQ ID NO: 6092286 - DNA, 25 bp, Homo sapien
taatgacgttgtagccacagaagga

SEQ ID NO: 6092287 - DNA, 25 bp, Homo sapien
tagaacactatgaccactgtcaggt

SEQ ID NO: 6092288 - DNA, 25 bp, Homo sapien
tgaatgtgcaatagaggtaagggat

SEQ ID NO: 6092289 - DNA, 25 bp, Homo sapien
tccttcgtagggcatattttacatc

SEQ ID NO: 6092290 - DNA, 25 bp, Homo sapien
ccagggtgtaaaatatggaagccac

SEQ ID NO: 6092291 - DNA, 25 bp, Homo sapien
cataattttatagccgcccttctcg

SEQ ID NO: 6092292 - DNA, 25 bp, Homo sapien
tgatgataaagaggtaggaggccag

SEQ ID NO: 6092293 - DNA, 25 bp, Homo sapien
gtagaaactattttgtccatatcaa

SEQ ID NO: 6092294 - DNA, 25 bp, Homo sapien
gggagagcgtagatgtagagaatgg

SEQ ID NO: 6092295 - DNA, 25 bp, Homo sapien
caaaagaatagctagatctggggag

SEQ ID NO: 6092296 - DNA, 25 bp, Homo sapien
tatgagactgctaccagcaatgcac

SEQ ID NO: 6092297 - DNA, 25 bp, Homo sapien
gagactgctaccagcaatgcacaca

SEQ ID NO: 6092298 - DNA, 25 bp, Homo sapien
agttaataaagccaccacaatatga

SEQ ID NO: 6092299 - DNA, 25 bp, Homo sapien
tgttttcacggcagaagttaaagga

SEQ ID NO: 6092300 - DNA, 25 bp, Homo sapien
caatgatgttttcacggcagaagtt

SEQ ID NO: 6092301 - DNA, 25 bp, Homo sapien
caccacaatatgagactgctaccag

SEQ ID NO: 6092302 - DNA, 25 bp, Homo sapien
agaaggctttgaggtagcccttgga

SEQ ID NO: 6092303 - DNA, 25 bp, Homo sapien
agacagcatacaggatcctgacata

SEQ ID NO: 6092304 - DNA, 25 bp, Homo sapien
ccagtaacaagagagatatgttgcc

SEQ ID NO: 6092305 - DNA, 25 bp, Homo sapien
accagtggaacaaccatgtacaggc

SEQ ID NO: 6092306 - DNA, 25 bp, Homo sapien
gaacaaccatgtacaggctcctcag

SEQ ID NO: 6092307 - DNA, 25 bp, Homo sapien
tatatactgtgggatattatggcca

SEQ ID NO: 6092308 - DNA, 25 bp, Homo sapien
taacatccagtaacaagagagatat

SEQ ID NO: 6092309 - DNA, 25 bp, Homo sapien
caaaacgatgtgtcaagaatgaaaa

SEQ ID NO: 6092310 - DNA, 25 bp, Homo sapien
caagagagatatgttgccaaggcca

SEQ ID NO: 6092311 - DNA, 25 bp, Homo sapien
gagaataataaggataacatccagt

SEQ ID NO: 6092312 - DNA, 25 bp, Homo sapien
tttgtcctgactccatagattacag

SEQ ID NO: 6092313 - DNA, 25 bp, Homo sapien
cacatacaggttggctaatataata

SEQ ID NO: 6092314 - DNA, 25 bp, Homo sapien
gttgccaaggccaaacctaatgttg

SEQ ID NO: 6092315 - DNA, 25 bp, Homo sapien
gctaacctggccaaagctatgtgct

SEQ ID NO: 6092316 - DNA, 25 bp, Homo sapien
caaccaggccgcatagatggatgcc

SEQ ID NO: 6092317 - DNA, 25 bp, Homo sapien
tcagagcccaccataagagaggaac

SEQ ID NO: 6092318 - DNA, 25 bp, Homo sapien
cagtaggagtggacaaccacattgg

SEQ ID NO: 6092319 - DNA, 25 bp, Homo sapien
cataagagaggaaccaatcagactg

SEQ ID NO: 6092320 - DNA, 25 bp, Homo sapien
tagatggatgccatcccaggtagat

SEQ ID NO: 6092321 - DNA, 25 bp, Homo sapien
tggctgggatgatcacgtacaggtc

SEQ ID NO: 6092322 - DNA, 25 bp, Homo sapien
tctcttgtagtgtagaggcttgcag

SEQ ID NO: 6092323 - DNA, 25 bp, Homo sapien
gtcagcacatgctaacctggccaaa

SEQ ID NO: 6092324 - DNA, 25 bp, Homo sapien
gagaattaagatataggaggcagca

SEQ ID NO: 6092325 - DNA, 25 bp, Homo sapien
tgatcacgtacaggtcagctagcag

SEQ ID NO: 6092326 - DNA, 25 bp, Homo sapien
cattcccagcatcacttgaggcgtg

SEQ ID NO: 6092327 - DNA, 25 bp, Homo sapien
tctcttgtagtgtagaggcttgcag

SEQ ID NO: 6092328 - DNA, 25 bp, Homo sapien
tgatcacgtacaggtcagctagcag

SEQ ID NO: 6092329 - DNA, 25 bp, Homo sapien
tagatggatgccatcccaggtagat

SEQ ID NO: 6092330 - DNA, 25 bp, Homo sapien
tcagagcccaccataagagaggaac

SEQ ID NO: 6092331 - DNA, 25 bp, Homo sapien
cagtaggagtggacaaccacattgg

SEQ ID NO: 6092332 - DNA, 25 bp, Homo sapien
cataagagaggaaccaatcagactg

SEQ ID NO: 6092333 - DNA, 25 bp, Homo sapien
cattcccagcatcacttgaggcgtg

SEQ ID NO: 6092334 - DNA, 25 bp, Homo sapien
tggctgggatgatcacgtacaggtc

SEQ ID NO: 6092335 - DNA, 25 bp, Homo sapien
gtcagcacatgctaacctggccaaa

SEQ ID NO: 6092336 - DNA, 25 bp, Homo sapien
gagaattaagatataggaggcagca

SEQ ID NO: 6092337 - DNA, 25 bp, Homo sapien
caaccaggccgcatagatggatgcc

SEQ ID NO: 6092338 - DNA, 25 bp, Homo sapien
gctaacctggccaaagctatgtgct

SEQ ID NO: 6092339 - DNA, 25 bp, Homo sapien
aagaccaccagctcattcatgtaag

SEQ ID NO: 6092340 - DNA, 25 bp, Homo sapien
gacaaggttgtcagcacagaaggtc

SEQ ID NO: 6092341 - DNA, 25 bp, Homo sapien
tgggcattccaacgtcaacagccac

SEQ ID NO: 6092342 - DNA, 25 bp, Homo sapien
gctatagattaatgggtttaacacg

SEQ ID NO: 6092343 - DNA, 25 bp, Homo sapien
tacatgaaagcaccagaaccaaaga

SEQ ID NO: 6092344 - DNA, 25 bp, Homo sapien
tcatgtaagagctgttgcaggagag

SEQ ID NO: 6092345 - DNA, 25 bp, Homo sapien
ggaaggatgtcacacatgaaatgat

SEQ ID NO: 6092346 - DNA, 25 bp, Homo sapien
gactcagagacgacaaagaagcaga

SEQ ID NO: 6092347 - DNA, 25 bp, Homo sapien
tctgtagaactgttgtgtagaatgc

SEQ ID NO: 6092348 - DNA, 25 bp, Homo sapien
gactattatggtatagaacagggag

SEQ ID NO: 6092349 - DNA, 25 bp, Homo sapien
tatgtgggaactgcaagtactaaag

SEQ ID NO: 6092350 - DNA, 25 bp, Homo sapien
gaaactacaattatgtgggaactgc

SEQ ID NO: 6092351 - DNA, 25 bp, Homo sapien
gatcatatcctggtggaggcaatag

SEQ ID NO: 6092352 - DNA, 25 bp, Homo sapien
ggcaagagcaaatccataccagctg

SEQ ID NO: 6092353 - DNA, 25 bp, Homo sapien
tataggagatcacaatgagcagagg

SEQ ID NO: 6092354 - DNA, 25 bp, Homo sapien
cgataataatgagcaaggcaagagc

SEQ ID NO: 6092355 - DNA, 25 bp, Homo sapien
tcaacggacatagccaggaggacag

SEQ ID NO: 6092356 - DNA, 25 bp, Homo sapien
tggcagaaaggcagtcgcttgagta

SEQ ID NO: 6092357 - DNA, 25 bp, Homo sapien
gcatgcttggcaaagcgatgagtca

SEQ ID NO: 6092358 - DNA, 25 bp, Homo sapien
gagtcatagatacaccaaccatggg

SEQ ID NO: 6092359 - DNA, 25 bp, Homo sapien
gcaaatgatggctaacccagttcta

SEQ ID NO: 6092360 - DNA, 25 bp, Homo sapien
caaccatgggaatgtagaggaccag

SEQ ID NO: 6092361 - DNA, 25 bp, Homo sapien
agttattgagggcacggagtcgctc

SEQ ID NO: 6092362 - DNA, 25 bp, Homo sapien
tgagcagaggatccacgataataat

SEQ ID NO: 6092363 - DNA, 25 bp, Homo sapien
agcagtgtgcagactcttcgattca

SEQ ID NO: 6092364 - DNA, 25 bp, Homo sapien
cttttgctgagggtttaatgtacat

SEQ ID NO: 6092365 - DNA, 25 bp, Homo sapien
tgccataagagatggagacaacaac

SEQ ID NO: 6092366 - DNA, 25 bp, Homo sapien
gagtaaacgcagcacaagaaaatcc

SEQ ID NO: 6092367 - DNA, 25 bp, Homo sapien
cctctgactagtagaaggaattctc

SEQ ID NO: 6092368 - DNA, 25 bp, Homo sapien
tgaacattagagtaaacgcagcaca

SEQ ID NO: 6092369 - DNA, 25 bp, Homo sapien
tgtgtctgaacaagcaagttgcagc

SEQ ID NO: 6092370 - DNA, 25 bp, Homo sapien
tcgattcatgatactcaagcaatgc

SEQ ID NO: 6092371 - DNA, 25 bp, Homo sapien
gaggtgtttagtattgccactccct

SEQ ID NO: 6092372 - DNA, 25 bp, Homo sapien
tgccaaagtgaacattagagtaaac

SEQ ID NO: 6092373 - DNA, 25 bp, Homo sapien
caataatattagacctacagtaatg

SEQ ID NO: 6092374 - DNA, 25 bp, Homo sapien
agagatggagacaacaaccatgtgg

SEQ ID NO: 6092375 - DNA, 25 bp, Homo sapien
tggtatgtcctatagcaatcaggga

SEQ ID NO: 6092376 - DNA, 25 bp, Homo sapien
cacacctgtcacgtatattataagc

SEQ ID NO: 6092377 - DNA, 25 bp, Homo sapien
tattataagctcatacctggaggta

SEQ ID NO: 6092378 - DNA, 25 bp, Homo sapien
ctatagcaatcagggatgccaggat

SEQ ID NO: 6092379 - DNA, 25 bp, Homo sapien
tgcatagtgtacatggtatgtccta

SEQ ID NO: 6092380 - DNA, 25 bp, Homo sapien
cagaaagggaggtgcatagtgtaca

SEQ ID NO: 6092381 - DNA, 25 bp, Homo sapien
agcagatgcctgatttcccaggaca

SEQ ID NO: 6092382 - DNA, 25 bp, Homo sapien
gatgtggccaccatgatccagcaga

SEQ ID NO: 6092383 - DNA, 25 bp, Homo sapien
ggagcaagaggaaagtcacacctgt

SEQ ID NO: 6092384 - DNA, 25 bp, Homo sapien
gacacacagaaagggaggtgcatag

SEQ ID NO: 6092385 - DNA, 25 bp, Homo sapien
gatggcatacgaagcacagtgaata

SEQ ID NO: 6092386 - DNA, 25 bp, Homo sapien
aataggactagtgtgtaggaggcca

SEQ ID NO: 6092387 - DNA, 25 bp, Homo sapien
aagtacccacacagataaacccact

SEQ ID NO: 6092388 - DNA, 25 bp, Homo sapien
tgaactgcaatctgtaggtgtcggt

SEQ ID NO: 6092389 - DNA, 25 bp, Homo sapien
caatctgtaggtgtcggtacaggct

SEQ ID NO: 6092390 - DNA, 25 bp, Homo sapien
cttgtccatctgtgaattagggtgt

SEQ ID NO: 6092391 - DNA, 25 bp, Homo sapien
aaaatagccagaaacttgtccatct

SEQ ID NO: 6092392 - DNA, 25 bp, Homo sapien
agctgtccaacacattagggccaca

SEQ ID NO: 6092393 - DNA, 25 bp, Homo sapien
taggtgtcggtacaggctagtctga

SEQ ID NO: 6092394 - DNA, 25 bp, Homo sapien
gtcggtacaggctagtctgagaagc

SEQ ID NO: 6092395 - DNA, 25 bp, Homo sapien
tccatctgtgaattagggtgtggcc

SEQ ID NO: 6092396 - DNA, 25 bp, Homo sapien
tcacagtagaagctgtccaacacat

SEQ ID NO: 6092397 - DNA, 25 bp, Homo sapien
aagtatgaagaaagtacccacacag

SEQ ID NO: 6092398 - DNA, 25 bp, Homo sapien
aatgccagttggaacagggagtgac

SEQ ID NO: 6092399 - DNA, 25 bp, Homo sapien
caatctgtaggtgtcggtacaggct

SEQ ID NO: 6092400 - DNA, 25 bp, Homo sapien
aagtatgaagaaagtacccacacag

SEQ ID NO: 6092401 - DNA, 25 bp, Homo sapien
tcacagtagaagctgtccaacacat

SEQ ID NO: 6092402 - DNA, 25 bp, Homo sapien
tgaactgcaatctgtaggtgtcggt

SEQ ID NO: 6092403 - DNA, 25 bp, Homo sapien
aaaatagccagaaacttgtccatct

SEQ ID NO: 6092404 - DNA, 25 bp, Homo sapien
gtcggtacaggctagtctgagaagc

SEQ ID NO: 6092405 - DNA, 25 bp, Homo sapien
taggtgtcggtacaggctagtctga

SEQ ID NO: 6092406 - DNA, 25 bp, Homo sapien
tccatctgtgaattagggtgtggcc

SEQ ID NO: 6092407 - DNA, 25 bp, Homo sapien
cttgtccatctgtgaattagggtgt

SEQ ID NO: 6092408 - DNA, 25 bp, Homo sapien
aagtacccacacagataaacccact

SEQ ID NO: 6092409 - DNA, 25 bp, Homo sapien
aatgccagttggaacagggagtgac

SEQ ID NO: 6092410 - DNA, 25 bp, Homo sapien
agctgtccaacacattagggccaca

SEQ ID NO: 6092411 - DNA, 25 bp, Homo sapien
gtcacagaaatccagctgtaagccc

SEQ ID NO: 6092412 - DNA, 25 bp, Homo sapien
gattcagcataggagcgacagaggt

SEQ ID NO: 6092413 - DNA, 25 bp, Homo sapien
gatgcagcttccataagagatagag

SEQ ID NO: 6092414 - DNA, 25 bp, Homo sapien
gcagagtcacaggtaaagtggtcaa

SEQ ID NO: 6092415 - DNA, 25 bp, Homo sapien
caggaggaaaaactccgttgagcca

SEQ ID NO: 6092416 - DNA, 25 bp, Homo sapien
tgtctgtgcaagagatttgcagcaa

SEQ ID NO: 6092417 - DNA, 25 bp, Homo sapien
cagccaagagctgattataagctga

SEQ ID NO: 6092418 - DNA, 25 bp, Homo sapien
cgacagaggtattgagtatagctac

SEQ ID NO: 6092419 - DNA, 25 bp, Homo sapien
tagagacaacaatcacatgtgagga

SEQ ID NO: 6092420 - DNA, 25 bp, Homo sapien
cactcatgatggttgtataatgcag

SEQ ID NO: 6092421 - DNA, 25 bp, Homo sapien
tggatataagagtaaacagagctaa

SEQ ID NO: 6092422 - DNA, 25 bp, Homo sapien
tataagctgataacagatcctgtca

SEQ ID NO: 6092423 - DNA, 25 bp, Homo sapien
caatggaccacaccgtgtcagggat

SEQ ID NO: 6092424 - DNA, 25 bp, Homo sapien
gaacttgcgggccacgttggccgca

SEQ ID NO: 6092425 - DNA, 25 bp, Homo sapien
taaaggtggcgttgcacagagcata

SEQ ID NO: 6092426 - DNA, 25 bp, Homo sapien
tggaagtgtccttatcagccacggg

SEQ ID NO: 6092427 - DNA, 25 bp, Homo sapien
ccatgacgttgtagggcgtccaggt

SEQ ID NO: 6092428 - DNA, 25 bp, Homo sapien
cagaatggcaaagatcgttcgtgtc

SEQ ID NO: 6092429 - DNA, 25 bp, Homo sapien
cagcaggtgccggaaggtcttttta

SEQ ID NO: 6092430 - DNA, 25 bp, Homo sapien
ttgcgagcgatgctggcgaacttgc

SEQ ID NO: 6092431 - DNA, 25 bp, Homo sapien
tcattgcctgtctgcttcgtcacaa

SEQ ID NO: 6092432 - DNA, 25 bp, Homo sapien
agcagagccagtagccaatggacca

SEQ ID NO: 6092433 - DNA, 25 bp, Homo sapien
tctggcagaaggtgttcaccaggac

SEQ ID NO: 6092434 - DNA, 25 bp, Homo sapien
gcaggcacaatctcaatggctgtca

SEQ ID NO: 6092435 - DNA, 25 bp, Homo sapien
gaagagcgagacttagacttggcgc

SEQ ID NO: 6092436 - DNA, 25 bp, Homo sapien
tgcaaacccgctctagaagagcgag

SEQ ID NO: 6092437 - DNA, 25 bp, Homo sapien
tgcctgaatgttaggcaggactccg

SEQ ID NO: 6092438 - DNA, 25 bp, Homo sapien
ttacgaagcagacgatggatccggc

SEQ ID NO: 6092439 - DNA, 25 bp, Homo sapien
tgggcaatggtcacgccgcccaaaa

SEQ ID NO: 6092440 - DNA, 25 bp, Homo sapien
gctctgcatagtttcccttacgaag

SEQ ID NO: 6092441 - DNA, 25 bp, Homo sapien
tattgagttcctcatcattgcggat

SEQ ID NO: 6092442 - DNA, 25 bp, Homo sapien
tgtgagatactctaacactgccgcc

SEQ ID NO: 6092443 - DNA, 25 bp, Homo sapien
tgttatcgcgagacgcattgcctgc

SEQ ID NO: 6092444 - DNA, 25 bp, Homo sapien
tgcctgccagctcaaggatttctgc

SEQ ID NO: 6092445 - DNA, 25 bp, Homo sapien
gctttgggctttatggtggtgactc

SEQ ID NO: 6092446 - DNA, 25 bp, Homo sapien
cactgccgccaaatacactggtgcg

SEQ ID NO: 6092447 - DNA, 25 bp, Homo sapien
cttaaatatagctcgaatcactggt

SEQ ID NO: 6092448 - DNA, 25 bp, Homo sapien
cagagttagaaatgttaagactggc

SEQ ID NO: 6092449 - DNA, 25 bp, Homo sapien
tgtacatcagggaggagtgctttca

SEQ ID NO: 6092450 - DNA, 25 bp, Homo sapien
gcagcaagtaccaagacattgtgca

SEQ ID NO: 6092451 - DNA, 25 bp, Homo sapien
catattttcccaactgtacatcagg

SEQ ID NO: 6092452 - DNA, 25 bp, Homo sapien
gagcatagaccttttattttccaga

SEQ ID NO: 6092453 - DNA, 25 bp, Homo sapien
gagaaattatttggcatgccactag

SEQ ID NO: 6092454 - DNA, 25 bp, Homo sapien
gaatcactggttagatatggacata

SEQ ID NO: 6092455 - DNA, 25 bp, Homo sapien
ccactagtgatacttagggtcatgg

SEQ ID NO: 6092456 - DNA, 25 bp, Homo sapien
ccacagaaggtaatggagtctttac

SEQ ID NO: 6092457 - DNA, 25 bp, Homo sapien
gaggagtgctttcattagtttcaga

SEQ ID NO: 6092458 - DNA, 25 bp, Homo sapien
cctccataagttaagggttgtgctt

SEQ ID NO: 6092459 - DNA, 25 bp, Homo sapien
cagcacagggttgacatcacaaaaa

SEQ ID NO: 6092460 - DNA, 25 bp, Homo sapien
tccttgacagtatagctggacaaag

SEQ ID NO: 6092461 - DNA, 25 bp, Homo sapien
cagcatctgcggttcataacagtga

SEQ ID NO: 6092462 - DNA, 25 bp, Homo sapien
tgtaagccccgtttcatgtctttgt

SEQ ID NO: 6092463 - DNA, 25 bp, Homo sapien
gatgtacaaaaggtgagccgattca

SEQ ID NO: 6092464 - DNA, 25 bp, Homo sapien
gattgttgctattcggtccttgaca

SEQ ID NO: 6092465 - DNA, 25 bp, Homo sapien
tccagctgctgagggaatcttgaga

SEQ ID NO: 6092466 - DNA, 25 bp, Homo sapien
tgatacagacaaatggagccatcac

SEQ ID NO: 6092467 - DNA, 25 bp, Homo sapien
gataaatgggttcaacactgatgtc

SEQ ID NO: 6092468 - DNA, 25 bp, Homo sapien
aaatggctacacagcggttgatggc

SEQ ID NO: 6092469 - DNA, 25 bp, Homo sapien
aatggaatgggttacaaatggctac

SEQ ID NO: 6092470 - DNA, 25 bp, Homo sapien
attcaccaggaggacatgtaggaga

SEQ ID NO: 6092471 - DNA, 25 bp, Homo sapien
agagcaggagagctttagcacaggc

SEQ ID NO: 6092472 - DNA, 25 bp, Homo sapien
cacagaaagacaagcgagacataag

SEQ ID NO: 6092473 - DNA, 25 bp, Homo sapien
cggtcgatggccatagaggccagca

SEQ ID NO: 6092474 - DNA, 25 bp, Homo sapien
ggtagctgtcagtgttcccaaatgc

SEQ ID NO: 6092475 - DNA, 25 bp, Homo sapien
cagatggccaccagccggtcgatgg

SEQ ID NO: 6092476 - DNA, 25 bp, Homo sapien
tcataaccacatcatagtgtaaggg

SEQ ID NO: 6092477 - DNA, 25 bp, Homo sapien
ggagatgctgcaagaacccaatagc

SEQ ID NO: 6092478 - DNA, 25 bp, Homo sapien
aaaagtgcttaatgatgtgagaggc

SEQ ID NO: 6092479 - DNA, 25 bp, Homo sapien
gacagctaaggtctcagtcatcacc

SEQ ID NO: 6092480 - DNA, 25 bp, Homo sapien
tgggtgtcactactgtgtacataac

SEQ ID NO: 6092481 - DNA, 25 bp, Homo sapien
tgtgtacataactgtggctacccgg

SEQ ID NO: 6092482 - DNA, 25 bp, Homo sapien
gacataagtagcacgcggaacaggg

SEQ ID NO: 6092483 - DNA, 25 bp, Homo sapien
tggtaccagcagatacacataggac

SEQ ID NO: 6092484 - DNA, 25 bp, Homo sapien
gaggagagcacttctaagcactgag

SEQ ID NO: 6092485 - DNA, 25 bp, Homo sapien
aacttcttaatgatgcgctggcgaa

SEQ ID NO: 6092486 - DNA, 25 bp, Homo sapien
gatgttcaccaaagcgatgcacaag

SEQ ID NO: 6092487 - DNA, 25 bp, Homo sapien
tagcggtcaatggacatggataaca

SEQ ID NO: 6092488 - DNA, 25 bp, Homo sapien
caatgctgagcacggtgcgaaggat

SEQ ID NO: 6092489 - DNA, 25 bp, Homo sapien
gatgtagaagagcagtacagcacag

SEQ ID NO: 6092490 - DNA, 25 bp, Homo sapien
tgacaatgatgctagagcaggccag

SEQ ID NO: 6092491 - DNA, 25 bp, Homo sapien
tctccaggtgaagacaataagcatg

SEQ ID NO: 6092492 - DNA, 25 bp, Homo sapien
gcgatgcacaagagacaagccaatc

SEQ ID NO: 6092493 - DNA, 25 bp, Homo sapien
aggacatgaagaggtgtacaacgcg

SEQ ID NO: 6092494 - DNA, 25 bp, Homo sapien
aaagagcccatagatgtgattgaca

SEQ ID NO: 6092495 - DNA, 25 bp, Homo sapien
gaataactgagctaatgcagccaca

SEQ ID NO: 6092496 - DNA, 25 bp, Homo sapien
atggccgccaggagaaatccctcag

SEQ ID NO: 6092497 - DNA, 25 bp, Homo sapien
gactagggagtaacataaggatgcc

SEQ ID NO: 6092498 - DNA, 25 bp, Homo sapien
caggaaatctgtcaggagtgagata

SEQ ID NO: 6092499 - DNA, 25 bp, Homo sapien
tctgaagtgggcgagaatcacagta

SEQ ID NO: 6092500 - DNA, 25 bp, Homo sapien
aaggccttcttatgtccctcagtag

SEQ ID NO: 6092501 - DNA, 25 bp, Homo sapien
catttgaacagagtagagcagaggg

SEQ ID NO: 6092502 - DNA, 25 bp, Homo sapien
taggaaccagccaccaactgagtac

SEQ ID NO: 6092503 - DNA, 25 bp, Homo sapien
cccgagaagcgcaaaaagataaagt

SEQ ID NO: 6092504 - DNA, 25 bp, Homo sapien
tcagtcacaatgaggagggcaaaga

SEQ ID NO: 6092505 - DNA, 25 bp, Homo sapien
aatgtatctttagaactgtggacac

SEQ ID NO: 6092506 - DNA, 25 bp, Homo sapien
aaaagtggtcaacagcccgagaagc

SEQ ID NO: 6092507 - DNA, 25 bp, Homo sapien
gaattagggagttcacggatgcccc

SEQ ID NO: 6092508 - DNA, 25 bp, Homo sapien
taaatcagagaattcaatgtgggcg

SEQ ID NO: 6092509 - DNA, 25 bp, Homo sapien
caatagagtgcactgggacctgggt

SEQ ID NO: 6092510 - DNA, 25 bp, Homo sapien
tgtggtctcatacacagtgatgtcg

SEQ ID NO: 6092511 - DNA, 25 bp, Homo sapien
ccttagctacatctttattccggag

SEQ ID NO: 6092512 - DNA, 25 bp, Homo sapien
cataccaacttcacaacagctggga

SEQ ID NO: 6092513 - DNA, 25 bp, Homo sapien
caatgtgggcgtaatgatgctgtag

SEQ ID NO: 6092514 - DNA, 25 bp, Homo sapien
atgtaggagaagatgcaggcaccaa

SEQ ID NO: 6092515 - DNA, 25 bp, Homo sapien
cacagcatagcgcagtggatgacag

SEQ ID NO: 6092516 - DNA, 25 bp, Homo sapien
gatgagcgcatctgaatgacacttt

SEQ ID NO: 6092517 - DNA, 25 bp, Homo sapien
gaagtggtagactttccgaggccca

SEQ ID NO: 6092518 - DNA, 25 bp, Homo sapien
tcaagatcgccatgtgaattaggga

SEQ ID NO: 6092519 - DNA, 25 bp, Homo sapien
cacaataccatcgtaggacatgaag

SEQ ID NO: 6092520 - DNA, 25 bp, Homo sapien
tacctgaatcatgacgatggctcgt

SEQ ID NO: 6092521 - DNA, 25 bp, Homo sapien
gaagcgtaggtacatgagagtcaca

SEQ ID NO: 6092522 - DNA, 25 bp, Homo sapien
caaggtgattcgaaccacaaaatgg

SEQ ID NO: 6092523 - DNA, 25 bp, Homo sapien
tgtaataatctccactgcatgaatg

SEQ ID NO: 6092524 - DNA, 25 bp, Homo sapien
gaagatgagcatcacagctgtaata

SEQ ID NO: 6092525 - DNA, 25 bp, Homo sapien
tggcagtgtagagatccaggcaatc

SEQ ID NO: 6092526 - DNA, 25 bp, Homo sapien
gacaatgaagtgagagacacacgtg

SEQ ID NO: 6092527 - DNA, 25 bp, Homo sapien
tatggccaggtagtggtcaaaggcc

SEQ ID NO: 6092528 - DNA, 25 bp, Homo sapien
ggaaaatgctgtgcggcggcctcca

SEQ ID NO: 6092529 - DNA, 25 bp, Homo sapien
tcccagaacaaagagtaggtggcag

SEQ ID NO: 6092530 - DNA, 25 bp, Homo sapien
tacgtagaattacagccacaatacc

SEQ ID NO: 6092531 - DNA, 25 bp, Homo sapien
gatgctcccaaagaagatgaggacc

SEQ ID NO: 6092532 - DNA, 25 bp, Homo sapien
ggaatagctcttctttagccgcaca

SEQ ID NO: 6092533 - DNA, 25 bp, Homo sapien
tagcagatgtgtccttgcaggccaa

SEQ ID NO: 6092534 - DNA, 25 bp, Homo sapien
gatgaggaccacagcaagatgtgag

SEQ ID NO: 6092535 - DNA, 25 bp, Homo sapien
ttcattgtaagcacaaaatgggagc

SEQ ID NO: 6092536 - DNA, 25 bp, Homo sapien
tatagcaagtgttcggtcaagggtc

SEQ ID NO: 6092537 - DNA, 25 bp, Homo sapien
aaagtccaccagaatgttagcagat

SEQ ID NO: 6092538 - DNA, 25 bp, Homo sapien
gaaagcattaatggcaaagtccacc

SEQ ID NO: 6092539 - DNA, 25 bp, Homo sapien
ggccatggctgtaagaaggtagcat

SEQ ID NO: 6092540 - DNA, 25 bp, Homo sapien
tcggtcaagggtcagggaatagctc

SEQ ID NO: 6092541 - DNA, 25 bp, Homo sapien
gatttccttgttacgaagactgtag

SEQ ID NO: 6092542 - DNA, 25 bp, Homo sapien
gaccattggtgttagtacggagtaa

SEQ ID NO: 6092543 - DNA, 25 bp, Homo sapien
tcaagatggtggtatatctcaaggg

SEQ ID NO: 6092544 - DNA, 25 bp, Homo sapien
tcagaatggctgaatccaggacaaa

SEQ ID NO: 6092545 - DNA, 25 bp, Homo sapien
gagatgcccatagcactcttgatga

SEQ ID NO: 6092546 - DNA, 25 bp, Homo sapien
caaaagccataccagaagttgatgg

SEQ ID NO: 6092547 - DNA, 25 bp, Homo sapien
tacatctggcaggatgatgcagaag

SEQ ID NO: 6092548 - DNA, 25 bp, Homo sapien
tatgatgcgtgtcctgcagaaaggc

SEQ ID NO: 6092549 - DNA, 25 bp, Homo sapien
cagaagcttcgaaaggagatgccca

SEQ ID NO: 6092550 - DNA, 25 bp, Homo sapien
tcacatctgagatgaccgtcatgat

SEQ ID NO: 6092551 - DNA, 25 bp, Homo sapien
cattgtgtccaaagcgatgggcgag

SEQ ID NO: 6092552 - DNA, 25 bp, Homo sapien
gatgtgtgcgtaggaaacagcaatg

SEQ ID NO: 6092553 - DNA, 25 bp, Homo sapien
tgagaaccacaagtgccgagggctt

SEQ ID NO: 6092554 - DNA, 25 bp, Homo sapien
ggcatgtcagcaagaatacatctgg

SEQ ID NO: 6092555 - DNA, 25 bp, Homo sapien
tcaagcgggcctgctgtgtcaggat

SEQ ID NO: 6092556 - DNA, 25 bp, Homo sapien
gatgagggtaccaaagaagagtgac

SEQ ID NO: 6092557 - DNA, 25 bp, Homo sapien
tgtaaagcacagacactacccgatt

SEQ ID NO: 6092558 - DNA, 25 bp, Homo sapien
caaagaagagtgacacagcagtgag

SEQ ID NO: 6092559 - DNA, 25 bp, Homo sapien
gagtgaaggctgagactgtccgcac

SEQ ID NO: 6092560 - DNA, 25 bp, Homo sapien
tccgaagactgatctgagttacctc

SEQ ID NO: 6092561 - DNA, 25 bp, Homo sapien
gacactacccgattcttctccgaag

SEQ ID NO: 6092562 - DNA, 25 bp, Homo sapien
ttgagtgtagctctccccacaggtc

SEQ ID NO: 6092563 - DNA, 25 bp, Homo sapien
cccacaggtcaactttaacagagga

SEQ ID NO: 6092564 - DNA, 25 bp, Homo sapien
tgtccgcaccaaggcactgatgaga

SEQ ID NO: 6092565 - DNA, 25 bp, Homo sapien
aataaagtcaatctcactggttcca

SEQ ID NO: 6092566 - DNA, 25 bp, Homo sapien
caactttaacagaggagggaggtca

SEQ ID NO: 6092567 - DNA, 25 bp, Homo sapien
catgggtggtacaaacaggtagaca

SEQ ID NO: 6092568 - DNA, 25 bp, Homo sapien
ttatgggcacataaaaggccagcac

SEQ ID NO: 6092569 - DNA, 25 bp, Homo sapien
gccacaaagcgatccaagctcatgg

SEQ ID NO: 6092570 - DNA, 25 bp, Homo sapien
ccaatatacggttgtgagtgagcac

SEQ ID NO: 6092571 - DNA, 25 bp, Homo sapien
tctcaggatcaatgcgtaggaaagc

SEQ ID NO: 6092572 - DNA, 25 bp, Homo sapien
tcttggtaaggatgcccagacccat

SEQ ID NO: 6092573 - DNA, 25 bp, Homo sapien
tgacatgcaggtgttgagtgccttg

SEQ ID NO: 6092574 - DNA, 25 bp, Homo sapien
tcatggagacagcaattatgggcac

SEQ ID NO: 6092575 - DNA, 25 bp, Homo sapien
tgatcaccaagagcccataaatgtt

SEQ ID NO: 6092576 - DNA, 25 bp, Homo sapien
gcagtatgcctgactccatgaagga

SEQ ID NO: 6092577 - DNA, 25 bp, Homo sapien
gagcacagtgacatagcgtaatgga

SEQ ID NO: 6092578 - DNA, 25 bp, Homo sapien
ggcagtcgtttcaccacaaaaggga

SEQ ID NO: 6092579 - DNA, 25 bp, Homo sapien
tgaactgcaatctgtaggtgtcggt

SEQ ID NO: 6092580 - DNA, 25 bp, Homo sapien
tcacagtagaagctgtccaacacat

SEQ ID NO: 6092581 - DNA, 25 bp, Homo sapien
aaaatagccagaaacttgtccatct

SEQ ID NO: 6092582 - DNA, 25 bp, Homo sapien
gtcggtacaggctagtctgagaagc

SEQ ID NO: 6092583 - DNA, 25 bp, Homo sapien
aagtatgaagaaagtacccacacag

SEQ ID NO: 6092584 - DNA, 25 bp, Homo sapien
aagtacccacacagataaacccact

SEQ ID NO: 6092585 - DNA, 25 bp, Homo sapien
taggtgtcggtacaggctagtctga

SEQ ID NO: 6092586 - DNA, 25 bp, Homo sapien
caatctgtaggtgtcggtacaggct

SEQ ID NO: 6092587 - DNA, 25 bp, Homo sapien
tccatctgtgaattagggtgtggcc

SEQ ID NO: 6092588 - DNA, 25 bp, Homo sapien
cttgtccatctgtgaattagggtgt

SEQ ID NO: 6092589 - DNA, 25 bp, Homo sapien
agctgtccaacacattagggccaca

SEQ ID NO: 6092590 - DNA, 25 bp, Homo sapien
aatgccagttggaacagggagtgac

SEQ ID NO: 6092591 - DNA, 25 bp, Homo sapien
gaagggcagtcttaggatgagaacc

SEQ ID NO: 6092592 - DNA, 25 bp, Homo sapien
caggatgtgcgagtaggagacaagc

SEQ ID NO: 6092593 - DNA, 25 bp, Homo sapien
cacacgtccaggaagtgacggccag

SEQ ID NO: 6092594 - DNA, 25 bp, Homo sapien
caccagcaggagacattcgctgtgt

SEQ ID NO: 6092595 - DNA, 25 bp, Homo sapien
ggagacattcgctgtgtccaaaact

SEQ ID NO: 6092596 - DNA, 25 bp, Homo sapien
caggtcatgatgacggagtatcgga

SEQ ID NO: 6092597 - DNA, 25 bp, Homo sapien
ggatgagaaccacatgggccagagc

SEQ ID NO: 6092598 - DNA, 25 bp, Homo sapien
atggccacgtaacgatcgtaggaca

SEQ ID NO: 6092599 - DNA, 25 bp, Homo sapien
agggagccacacgtccaggaagtga

SEQ ID NO: 6092600 - DNA, 25 bp, Homo sapien
cccagagaagggcagtcttaggatg

SEQ ID NO: 6092601 - DNA, 25 bp, Homo sapien
gtaacgatcgtaggacatcagcacc

SEQ ID NO: 6092602 - DNA, 25 bp, Homo sapien
atgatgatggcactgccaaagaaga

SEQ ID NO: 6092603 - DNA, 25 bp, Homo sapien
cctgtgggcatgcataatatggtgg

SEQ ID NO: 6092604 - DNA, 25 bp, Homo sapien
gaagtagatcttcgccagggagatg

SEQ ID NO: 6092605 - DNA, 25 bp, Homo sapien
tgaaggcatggataactcgaggtcg

SEQ ID NO: 6092606 - DNA, 25 bp, Homo sapien
cagttatggacatgtctgtgcagga

SEQ ID NO: 6092607 - DNA, 25 bp, Homo sapien
cagtgccaggataaagtctaccaac

SEQ ID NO: 6092608 - DNA, 25 bp, Homo sapien
tatggtggccagaatgcatccgtag

SEQ ID NO: 6092609 - DNA, 25 bp, Homo sapien
gagtgacaatggcatagaagatgga

SEQ ID NO: 6092610 - DNA, 25 bp, Homo sapien
gattaagtactggagagatgtcaca

SEQ ID NO: 6092611 - DNA, 25 bp, Homo sapien
caggacagtaataaagagtgggaat

SEQ ID NO: 6092612 - DNA, 25 bp, Homo sapien
gagcccatggctcattatggttggg

SEQ ID NO: 6092613 - DNA, 25 bp, Homo sapien
gacctctcggtttcttaggcaataa

SEQ ID NO: 6092614 - DNA, 25 bp, Homo sapien
gcatccgtaggacaggacagtaata

SEQ ID NO: 6092615 - DNA, 25 bp, Homo sapien
cacattgcccatgatatggaagtca

SEQ ID NO: 6092616 - DNA, 25 bp, Homo sapien
aggtcagccctgtaggccacgtagg

SEQ ID NO: 6092617 - DNA, 25 bp, Homo sapien
ccacgaccagaaggtgggagctgca

SEQ ID NO: 6092618 - DNA, 25 bp, Homo sapien
ctgttatatgccatctgggaggtcc

SEQ ID NO: 6092619 - DNA, 25 bp, Homo sapien
ccacgtaggctatggcaatagatga

SEQ ID NO: 6092620 - DNA, 25 bp, Homo sapien
tgggaggtccttactactgctggga

SEQ ID NO: 6092621 - DNA, 25 bp, Homo sapien
ggtgatggctgcctttacatccctg

SEQ ID NO: 6092622 - DNA, 25 bp, Homo sapien
cactggctgccaaggtagcattggt

SEQ ID NO: 6092623 - DNA, 25 bp, Homo sapien
tctagggaactgatgcgaagcactg

SEQ ID NO: 6092624 - DNA, 25 bp, Homo sapien
ggacaccaccatggcgatgcagaag

SEQ ID NO: 6092625 - DNA, 25 bp, Homo sapien
tagatgagtagtaggtgcccacgac

SEQ ID NO: 6092626 - DNA, 25 bp, Homo sapien
gagaatggcatataccacattgccc

SEQ ID NO: 6092627 - DNA, 25 bp, Homo sapien
tggctaccacgatgaagacatagga

SEQ ID NO: 6092628 - DNA, 25 bp, Homo sapien
tacagagcagtcttgtgaacgcgtg

SEQ ID NO: 6092629 - DNA, 25 bp, Homo sapien
caagtatataaagctggtgcagcca

SEQ ID NO: 6092630 - DNA, 25 bp, Homo sapien
tgcaggaggaccactaagatgtgag

SEQ ID NO: 6092631 - DNA, 25 bp, Homo sapien
aatgtgtaggccacagataccaccc

SEQ ID NO: 6092632 - DNA, 25 bp, Homo sapien
cataagccatgactaccagcaggac

SEQ ID NO: 6092633 - DNA, 25 bp, Homo sapien
cagagggtgacagatcgctataaac

SEQ ID NO: 6092634 - DNA, 25 bp, Homo sapien
atgagcctgtatcgcagagggtgac

SEQ ID NO: 6092635 - DNA, 25 bp, Homo sapien
tgaccggatccgtaaaatggctacc

SEQ ID NO: 6092636 - DNA, 25 bp, Homo sapien
agtggtagatctcatcattgtggca

SEQ ID NO: 6092637 - DNA, 25 bp, Homo sapien
gagtaggcttgctggcgcccttctg

SEQ ID NO: 6092638 - DNA, 25 bp, Homo sapien
ggcgcatgactgcaggcatgtcaca

SEQ ID NO: 6092639 - DNA, 25 bp, Homo sapien
tgtcaacattggagcatgaaagagc

SEQ ID NO: 6092640 - DNA, 25 bp, Homo sapien
ctgttcgggacatgattacagtata

SEQ ID NO: 6092641 - DNA, 25 bp, Homo sapien
ccagtgaatatcaagttagatccca

SEQ ID NO: 6092642 - DNA, 25 bp, Homo sapien
taaggatccactgccatcatagcca

SEQ ID NO: 6092643 - DNA, 25 bp, Homo sapien
caacaagtagcatgatgttgatgtc

SEQ ID NO: 6092644 - DNA, 25 bp, Homo sapien
aaagatgacgaccaacccagtgaat

SEQ ID NO: 6092645 - DNA, 25 bp, Homo sapien
gatgctattggacttgcagaaggac

SEQ ID NO: 6092646 - DNA, 25 bp, Homo sapien
ggcatttattgagcccatgatgtat

SEQ ID NO: 6092647 - DNA, 25 bp, Homo sapien
tatgaaccagctaccaaacggatgc

SEQ ID NO: 6092648 - DNA, 25 bp, Homo sapien
tgagcccatgatgtatgaaccagct

SEQ ID NO: 6092649 - DNA, 25 bp, Homo sapien
caaacggatgcagactgttcgggac

SEQ ID NO: 6092650 - DNA, 25 bp, Homo sapien
cctgggaattattagaatgagactg

SEQ ID NO: 6092651 - DNA, 25 bp, Homo sapien
ccaccatgcctggatcattaaaaaa

SEQ ID NO: 6092652 - DNA, 25 bp, Homo sapien
tagtgaaatgccgtctctactaaaa

SEQ ID NO: 6092653 - DNA, 25 bp, Homo sapien
aaaaagctgggcacagtggctcacg

SEQ ID NO: 6092654 - DNA, 25 bp, Homo sapien
aaaggtacacaccaccatgcctgga

SEQ ID NO: 6092655 - DNA, 25 bp, Homo sapien
tgatcgtggttcactgcagcctcgc

SEQ ID NO: 6092656 - DNA, 25 bp, Homo sapien
gatcacttgaggtcaagagtcccag

SEQ ID NO: 6092657 - DNA, 25 bp, Homo sapien
gcatagtggcacactcctgtagtcc

SEQ ID NO: 6092658 - DNA, 25 bp, Homo sapien
ggtcaagagtcccagaccagcttgg

SEQ ID NO: 6092659 - DNA, 25 bp, Homo sapien
gcctggccaacatagtgaaatgccg

SEQ ID NO: 6092660 - DNA, 25 bp, Homo sapien
tgagcagctgggactaaaggtacac

SEQ ID NO: 6092661 - DNA, 25 bp, Homo sapien
gctgagtgagagagagactctgcct

SEQ ID NO: 6092662 - DNA, 25 bp, Homo sapien
agtgcagtggcttgatcgtggttca

SEQ ID NO: 6092663 - DNA, 25 bp, Homo sapien
gcagcaggagaaaatcgggactccg

SEQ ID NO: 6092664 - DNA, 25 bp, Homo sapien
tcggttacagttacacaaagggtca

SEQ ID NO: 6092665 - DNA, 25 bp, Homo sapien
acagttacacaaagggtcacttcct

SEQ ID NO: 6092666 - DNA, 25 bp, Homo sapien
cagttacacaaagggtcacttcctc

SEQ ID NO: 6092667 - DNA, 25 bp, Homo sapien
tacagttacacaaagggtcacttcc

SEQ ID NO: 6092668 - DNA, 25 bp, Homo sapien
ttacagttacacaaagggtcacttc

SEQ ID NO: 6092669 - DNA, 25 bp, Homo sapien
ggaatcatttctgcggagctttcaa

SEQ ID NO: 6092670 - DNA, 25 bp, Homo sapien
tgtcacctgcgtggcttggtccagt

SEQ ID NO: 6092671 - DNA, 25 bp, Homo sapien
ttcggaagaacaccgagagatacct

SEQ ID NO: 6092672 - DNA, 25 bp, Homo sapien
cattgtttgcagaagcgcttggtga

SEQ ID NO: 6092673 - DNA, 25 bp, Homo sapien
gttactcaggccgaagaattcctgg

SEQ ID NO: 6092674 - DNA, 25 bp, Homo sapien
gcgtgtttgttgaagtcactccatc

SEQ ID NO: 6092675 - DNA, 25 bp, Homo sapien
tcacagttactcaggccgaagaatt

SEQ ID NO: 6092676 - DNA, 25 bp, Homo sapien
aataagggccacagacataaacaga

SEQ ID NO: 6092677 - DNA, 25 bp, Homo sapien
tctggcatttagtaaagatgattcc

SEQ ID NO: 6092678 - DNA, 25 bp, Homo sapien
ggaaattattccatcctcgtggaaa

SEQ ID NO: 6092679 - DNA, 25 bp, Homo sapien
tggaaggcgtgtttgttgaagtcac

SEQ ID NO: 6092680 - DNA, 25 bp, Homo sapien
ttggtgatgtgctttcggaagaaca

SEQ ID NO: 6092681 - DNA, 25 bp, Homo sapien
ccatcctcgtggaaaataagggcca

SEQ ID NO: 6092682 - DNA, 25 bp, Homo sapien
gcttaatgatctcgttatgccgcgt

SEQ ID NO: 6092683 - DNA, 25 bp, Homo sapien
gggcccgtcgattaaatttagtgca

SEQ ID NO: 6092684 - DNA, 25 bp, Homo sapien
tataggcccaaagtgcacccaatgg

SEQ ID NO: 6092685 - DNA, 25 bp, Homo sapien
caatgggtttcgtagcaaatacagc

SEQ ID NO: 6092686 - DNA, 25 bp, Homo sapien
gtaatccaccgagtgctccacgttg

SEQ ID NO: 6092687 - DNA, 25 bp, Homo sapien
gggtccgtcataaattagcgcaaaa

SEQ ID NO: 6092688 - DNA, 25 bp, Homo sapien
acgaacatgtcgtgcagctctcgga

SEQ ID NO: 6092689 - DNA, 25 bp, Homo sapien
caccacgcagcaaatgatgatgata

SEQ ID NO: 6092690 - DNA, 25 bp, Homo sapien
gcagctctcggatgctcgtttccag

SEQ ID NO: 6092691 - DNA, 25 bp, Homo sapien
gatacggcgcgttccacgtaatcca

SEQ ID NO: 6092692 - DNA, 25 bp, Homo sapien
taacggctttcttggtgtcggatac

SEQ ID NO: 6092693 - DNA, 25 bp, Homo sapien
tatgccgcgtctcgatttcgttcag

SEQ ID NO: 6092694 - DNA, 25 bp, Homo sapien
cgctggaatttcttggcccgggatt

SEQ ID NO: 6092695 - DNA, 25 bp, Homo sapien
tacttctttcacagcagggaaggaa

SEQ ID NO: 6092696 - DNA, 25 bp, Homo sapien
aactgtctgagtccatatgctgccg

SEQ ID NO: 6092697 - DNA, 25 bp, Homo sapien
tggactggcacatatgggctccctt

SEQ ID NO: 6092698 - DNA, 25 bp, Homo sapien
ttaggtagagtcctccacagaagca

SEQ ID NO: 6092699 - DNA, 25 bp, Homo sapien
gaaggagccggacaagagacttctc

SEQ ID NO: 6092700 - DNA, 25 bp, Homo sapien
ccttcgggctggtccggtatgcaca

SEQ ID NO: 6092701 - DNA, 25 bp, Homo sapien
cacagaagcatcaaagtggactggc

SEQ ID NO: 6092702 - DNA, 25 bp, Homo sapien
tacctggagccgtttgtcaggcggc

SEQ ID NO: 6092703 - DNA, 25 bp, Homo sapien
gcaccagcagtatcaggacaagcag

SEQ ID NO: 6092704 - DNA, 25 bp, Homo sapien
aatgatgtgtctctccttcgggctg

SEQ ID NO: 6092705 - DNA, 25 bp, Homo sapien
gggctcgtgcacaaaggtgttcact

SEQ ID NO: 6092706 - DNA, 25 bp, Homo sapien
gtcccgcacaatctgaagtaagttc

SEQ ID NO: 6092707 - DNA, 25 bp, Homo sapien
tcccgcacaatctgaagtaagttca

SEQ ID NO: 6092708 - DNA, 25 bp, Homo sapien
gcacaatctgaagtaagttcaccat

SEQ ID NO: 6092709 - DNA, 25 bp, Homo sapien
ggtcccgcacaatctgaagtaagtt

SEQ ID NO: 6092710 - DNA, 25 bp, Homo sapien
ccgcacaatctgaagtaagttcacc

SEQ ID NO: 6092711 - DNA, 25 bp, Homo sapien
tggtcccgcacaatctgaagtaagt

SEQ ID NO: 6092712 - DNA, 25 bp, Homo sapien
cccgcacaatctgaagtaagttcac

SEQ ID NO: 6092713 - DNA, 25 bp, Homo sapien
cgcacaatctgaagtaagttcacca

SEQ ID NO: 6092714 - DNA, 25 bp, Homo sapien
ccatagggacaagaacatgaaccca

SEQ ID NO: 6092715 - DNA, 25 bp, Homo sapien
gagctgaaggtcttgaggcgcaggc

SEQ ID NO: 6092716 - DNA, 25 bp, Homo sapien
tggtcccagactgggtcttgacgct

SEQ ID NO: 6092717 - DNA, 25 bp, Homo sapien
ccccggagtagatgtaataggctct

SEQ ID NO: 6092718 - DNA, 25 bp, Homo sapien
ccagcttgagcacgcagtcgaagcg

SEQ ID NO: 6092719 - DNA, 25 bp, Homo sapien
cctcacactggatgcgcaggttctt

SEQ ID NO: 6092720 - DNA, 25 bp, Homo sapien
ggtcactgcgctccagtagaagccg

SEQ ID NO: 6092721 - DNA, 25 bp, Homo sapien
tgcagcttgcgcactgcgttcacca

SEQ ID NO: 6092722 - DNA, 25 bp, Homo sapien
gtagaagccgctctcctgcagcttg

SEQ ID NO: 6092723 - DNA, 25 bp, Homo sapien
gatgcgcaggttcttggtcccagac

SEQ ID NO: 6092724 - DNA, 25 bp, Homo sapien
ccggcagctgggtgactttctcata

SEQ ID NO: 6092725 - DNA, 25 bp, Homo sapien
gacggtcttccgacagagatgctga

SEQ ID NO: 6092726 - DNA, 25 bp, Homo sapien
tccaggtggccgttgacggtcttcc

SEQ ID NO: 6092727 - DNA, 25 bp, Homo sapien
taagtcacgctggacaaagaatgct

SEQ ID NO: 6092728 - DNA, 25 bp, Homo sapien
gggctcaaagcacttggtattattt

SEQ ID NO: 6092729 - DNA, 25 bp, Homo sapien
cagagacaaggttatgaccacggac

SEQ ID NO: 6092730 - DNA, 25 bp, Homo sapien
tatggcatgaaactgactaaaaagg

SEQ ID NO: 6092731 - DNA, 25 bp, Homo sapien
ggtcaaagcaacaattggatgcagc

SEQ ID NO: 6092732 - DNA, 25 bp, Homo sapien
cataatgcaagaccaaaacatgatt

SEQ ID NO: 6092733 - DNA, 25 bp, Homo sapien
ggtcacgaccatgatcattcctata

SEQ ID NO: 6092734 - DNA, 25 bp, Homo sapien
gaaatggagaactggtcaaaatcac

SEQ ID NO: 6092735 - DNA, 25 bp, Homo sapien
aaatataggagagggtcaaagcaac

SEQ ID NO: 6092736 - DNA, 25 bp, Homo sapien
gactaaaaaggcagcggtcacgacc

SEQ ID NO: 6092737 - DNA, 25 bp, Homo sapien
ttctttctgggtacataagtcacgc

SEQ ID NO: 6092738 - DNA, 25 bp, Homo sapien
acggacttctgcattctaaggacag

SEQ ID NO: 6092739 - DNA, 25 bp, Homo sapien
cagagacaaggttatgaccacggac

SEQ ID NO: 6092740 - DNA, 25 bp, Homo sapien
acggacttctgcattctaaggacag

SEQ ID NO: 6092741 - DNA, 25 bp, Homo sapien
taagtcacgctggacaaagaatgct

SEQ ID NO: 6092742 - DNA, 25 bp, Homo sapien
gggctcaaagcacttggtattattt

SEQ ID NO: 6092743 - DNA, 25 bp, Homo sapien
ggtcaaagcaacaattggatgcagc

SEQ ID NO: 6092744 - DNA, 25 bp, Homo sapien
ttctttctgggtacataagtcacgc

SEQ ID NO: 6092745 - DNA, 25 bp, Homo sapien
gactaaaaaggcagcggtcacgacc

SEQ ID NO: 6092746 - DNA, 25 bp, Homo sapien
cataatgcaagaccaaaacatgatt

SEQ ID NO: 6092747 - DNA, 25 bp, Homo sapien
gaaatggagaactggtcaaaatcac

SEQ ID NO: 6092748 - DNA, 25 bp, Homo sapien
tatggcatgaaactgactaaaaagg

SEQ ID NO: 6092749 - DNA, 25 bp, Homo sapien
aaatataggagagggtcaaagcaac

SEQ ID NO: 6092750 - DNA, 25 bp, Homo sapien
ggtcacgaccatgatcattcctata

SEQ ID NO: 6092751 - DNA, 25 bp, Homo sapien
aatgtgtcgcagttggctattggga

SEQ ID NO: 6092752 - DNA, 25 bp, Homo sapien
gttcatggaacgataagcagcatcc

SEQ ID NO: 6092753 - DNA, 25 bp, Homo sapien
gctgcagtctgtgtagaactgcctt

SEQ ID NO: 6092754 - DNA, 25 bp, Homo sapien
gaggcacttcctgagtgtccctaga

SEQ ID NO: 6092755 - DNA, 25 bp, Homo sapien
tacttaaactgcaagtctgcaatcg

SEQ ID NO: 6092756 - DNA, 25 bp, Homo sapien
tgttctctaggcgaatgtgtcgcag

SEQ ID NO: 6092757 - DNA, 25 bp, Homo sapien
tgtccctagagttggtcactggttt

SEQ ID NO: 6092758 - DNA, 25 bp, Homo sapien
caaaacgacccttccatttgtcctg

SEQ ID NO: 6092759 - DNA, 25 bp, Homo sapien
cagcatccagtctcttgttaccatg

SEQ ID NO: 6092760 - DNA, 25 bp, Homo sapien
cacctgcacatgtgttgtagtccac

SEQ ID NO: 6092761 - DNA, 25 bp, Homo sapien
cctcttaggatatgcagatgcaacc

SEQ ID NO: 6092762 - DNA, 25 bp, Homo sapien
catcaaaaatggaagtggtgtgctt

SEQ ID NO: 6092763 - DNA, 25 bp, Homo sapien
cagtcgtacattcggacagttatta

SEQ ID NO: 6092764 - DNA, 25 bp, Homo sapien
cagtagaatggtttgaacagagact

SEQ ID NO: 6092765 - DNA, 25 bp, Homo sapien
taagatgtcagtcgtacattcggac

SEQ ID NO: 6092766 - DNA, 25 bp, Homo sapien
gagctcatatctttgtaggtaccaa

SEQ ID NO: 6092767 - DNA, 25 bp, Homo sapien
aattgatccattacagatagtcata

SEQ ID NO: 6092768 - DNA, 25 bp, Homo sapien
ggtaccaacttcaattaaattatga

SEQ ID NO: 6092769 - DNA, 25 bp, Homo sapien
tatttgaacacatcgtagctgactt

SEQ ID NO: 6092770 - DNA, 25 bp, Homo sapien
tacttggcaaattgtggtccatggg

SEQ ID NO: 6092771 - DNA, 25 bp, Homo sapien
ccaaagtcatatccaaaattgatcc

SEQ ID NO: 6092772 - DNA, 25 bp, Homo sapien
tgccgaccgacacgctttaagatgt

SEQ ID NO: 6092773 - DNA, 25 bp, Homo sapien
gcttataatgtttacttacctggcc

SEQ ID NO: 6092774 - DNA, 25 bp, Homo sapien
cagatagtcatatgtagtagtgagc

SEQ ID NO: 6092775 - DNA, 25 bp, Homo sapien
tcttgggccctcctgcagtacgggc

SEQ ID NO: 6092776 - DNA, 25 bp, Homo sapien
gcagttcacaaactcttgagccata

SEQ ID NO: 6092777 - DNA, 25 bp, Homo sapien
gcagttccccactctgttgcaaaga

SEQ ID NO: 6092778 - DNA, 25 bp, Homo sapien
gcatccgcctatacaatctttaccg

SEQ ID NO: 6092779 - DNA, 25 bp, Homo sapien
tgttgcaaagagactagatcactgc

SEQ ID NO: 6092780 - DNA, 25 bp, Homo sapien
tgctcccgtgagctgttgcaaataa

SEQ ID NO: 6092781 - DNA, 25 bp, Homo sapien
agttcacaaactcttgagccatatg

SEQ ID NO: 6092782 - DNA, 25 bp, Homo sapien
ttaccgataaagactcgaggcaccg

SEQ ID NO: 6092783 - DNA, 25 bp, Homo sapien
tctttaccgataaagactcgaggca

SEQ ID NO: 6092784 - DNA, 25 bp, Homo sapien
ccagaagcccttgtttgatgggcaa

SEQ ID NO: 6092785 - DNA, 25 bp, Homo sapien
cgataaagactcgaggcaccgttct

SEQ ID NO: 6092786 - DNA, 25 bp, Homo sapien
cgaggcaccgttcttgctcccgtga

SEQ ID NO: 6092787 - DNA, 25 bp, Homo sapien
tgaggaacatcttgatagttttcac

SEQ ID NO: 6092788 - DNA, 25 bp, Homo sapien
tgatagctgtgaaaacaagggaact

SEQ ID NO: 6092789 - DNA, 25 bp, Homo sapien
taggcattgcttcggtaacatttca

SEQ ID NO: 6092790 - DNA, 25 bp, Homo sapien
taaaggatatccatgtgatagctgt

SEQ ID NO: 6092791 - DNA, 25 bp, Homo sapien
ggatttgagttaatgggccaagcaa

SEQ ID NO: 6092792 - DNA, 25 bp, Homo sapien
catagctgagctacatgaaaaggca

SEQ ID NO: 6092793 - DNA, 25 bp, Homo sapien
tcatccctctccgaaaattggcatt

SEQ ID NO: 6092794 - DNA, 25 bp, Homo sapien
ggtaacatttcatagaggacatgca

SEQ ID NO: 6092795 - DNA, 25 bp, Homo sapien
tctgtcaaatgagtcatagatcgag

SEQ ID NO: 6092796 - DNA, 25 bp, Homo sapien
gagtctttggtaatagttttggcca

SEQ ID NO: 6092797 - DNA, 25 bp, Homo sapien
tgtccgagggacaatgttcattgtc

SEQ ID NO: 6092798 - DNA, 25 bp, Homo sapien
tacagagtaggtttagaggctgaag

SEQ ID NO: 6092799 - DNA, 25 bp, Homo sapien
cgtagccgcatctgcctggtcaggc

SEQ ID NO: 6092800 - DNA, 25 bp, Homo sapien
cgccaaaggtgacgaggaagtacat

SEQ ID NO: 6092801 - DNA, 25 bp, Homo sapien
ccagcagctggcgtgtcatgaggtt

SEQ ID NO: 6092802 - DNA, 25 bp, Homo sapien
atcttggccaggtccgacaggcgct

SEQ ID NO: 6092803 - DNA, 25 bp, Homo sapien
gcgtccagttctgcgaggtgcctgt

SEQ ID NO: 6092804 - DNA, 25 bp, Homo sapien
cattccagcgctcgaactgtagccg

SEQ ID NO: 6092805 - DNA, 25 bp, Homo sapien
gtgatggtgaccttgcccggcttgt

SEQ ID NO: 6092806 - DNA, 25 bp, Homo sapien
gaagtacatgaccttgcggatcttg

SEQ ID NO: 6092807 - DNA, 25 bp, Homo sapien
cattccaatctatggcatccgagtc

SEQ ID NO: 6092808 - DNA, 25 bp, Homo sapien
gggcgtcggcctcattccaatctat

SEQ ID NO: 6092809 - DNA, 25 bp, Homo sapien
cctccttgcgccagaagatggcagt

SEQ ID NO: 6092810 - DNA, 25 bp, Homo sapien
tggtccaggaccagcggcatgtcca

SEQ ID NO: 6092811 - DNA, 25 bp, Homo sapien
cacaattccattgtctataccttcc

SEQ ID NO: 6092812 - DNA, 25 bp, Homo sapien
tatcacaggtttctgtacatgcatt

SEQ ID NO: 6092813 - DNA, 25 bp, Homo sapien
tctgtacatgcattggaggtttgct

SEQ ID NO: 6092814 - DNA, 25 bp, Homo sapien
tcctacaagggtataaatatcacag

SEQ ID NO: 6092815 - DNA, 25 bp, Homo sapien
gagaaacatagagattaagctactc

SEQ ID NO: 6092816 - DNA, 25 bp, Homo sapien
tggagagaaacatagagattaagct

SEQ ID NO: 6092817 - DNA, 25 bp, Homo sapien
acatgcattggaggtttgctatgcg

SEQ ID NO: 6092818 - DNA, 25 bp, Homo sapien
gaaacatagagattaagctactcac

SEQ ID NO: 6092819 - DNA, 25 bp, Homo sapien
aaatatcacaggtttctgtacatgc

SEQ ID NO: 6092820 - DNA, 25 bp, Homo sapien
gaaaatagttgcaggaggaatgaaa

SEQ ID NO: 6092821 - DNA, 25 bp, Homo sapien
gattaagctactcacaattccattg

SEQ ID NO: 6092822 - DNA, 25 bp, Homo sapien
tagagattaagctactcacaattcc

SEQ ID NO: 6092823 - DNA, 25 bp, Homo sapien
ggattatacccgtcttagtctcgat

SEQ ID NO: 6092824 - DNA, 25 bp, Homo sapien
cactttcagggtaaggtggatggtc

SEQ ID NO: 6092825 - DNA, 25 bp, Homo sapien
gcccagcaaaagaacctggtcctgc

SEQ ID NO: 6092826 - DNA, 25 bp, Homo sapien
cagaagatgtgttcgttgagtaaga

SEQ ID NO: 6092827 - DNA, 25 bp, Homo sapien
tgagctggaccttcgcacctggagg

SEQ ID NO: 6092828 - DNA, 25 bp, Homo sapien
tccattgcaagtcacaatctgggtc

SEQ ID NO: 6092829 - DNA, 25 bp, Homo sapien
tgccctttctgatgccgtaatctgc

SEQ ID NO: 6092830 - DNA, 25 bp, Homo sapien
acctgactccacaagaaacaagggc

SEQ ID NO: 6092831 - DNA, 25 bp, Homo sapien
aggaggtgcctctttgcctcatcac

SEQ ID NO: 6092832 - DNA, 25 bp, Homo sapien
tagagttgggcaatatacttcatcc

SEQ ID NO: 6092833 - DNA, 25 bp, Homo sapien
gcttctccgtggctttaagatcttg

SEQ ID NO: 6092834 - DNA, 25 bp, Homo sapien
aatctgggtctcagggattataccc

SEQ ID NO: 6092835 - DNA, 25 bp, Homo sapien
ttattatcagaaccaagtcccagag

SEQ ID NO: 6092836 - DNA, 25 bp, Homo sapien
gagaaagtctctcaactgtagtgac

SEQ ID NO: 6092837 - DNA, 25 bp, Homo sapien
cagagaggcccgatagagataagtc

SEQ ID NO: 6092838 - DNA, 25 bp, Homo sapien
gagttgctcaacagcacacccagag

SEQ ID NO: 6092839 - DNA, 25 bp, Homo sapien
gatttcgcaggtcggcagcattgta

SEQ ID NO: 6092840 - DNA, 25 bp, Homo sapien
taccccagtggcaagatttcgcagg

SEQ ID NO: 6092841 - DNA, 25 bp, Homo sapien
gcagtacggagctcacctatattgg

SEQ ID NO: 6092842 - DNA, 25 bp, Homo sapien
gatcctctgtagagcgacagcagct

SEQ ID NO: 6092843 - DNA, 25 bp, Homo sapien
tggtgcaacttggtacacacgaaga

SEQ ID NO: 6092844 - DNA, 25 bp, Homo sapien
caaagtctggaagtaactgagggac

SEQ ID NO: 6092845 - DNA, 25 bp, Homo sapien
cagtgggaagaactaagcgagcagt

SEQ ID NO: 6092846 - DNA, 25 bp, Homo sapien
tggtgggtctccatggtcccgaacc

SEQ ID NO: 6092847 - DNA, 25 bp, Homo sapien
gtatacgttgacatccaccagcgca

SEQ ID NO: 6092848 - DNA, 25 bp, Homo sapien
tgtccctagagtcaggtaaactggg

SEQ ID NO: 6092849 - DNA, 25 bp, Homo sapien
tgaggaggcctttggcgcctgtcca

SEQ ID NO: 6092850 - DNA, 25 bp, Homo sapien
tccttcaccagtaccagtaggcggt

SEQ ID NO: 6092851 - DNA, 25 bp, Homo sapien
cggagcgtccgtttcgtccagggca

SEQ ID NO: 6092852 - DNA, 25 bp, Homo sapien
gctcgtacgaaagccacgcgttgta

SEQ ID NO: 6092853 - DNA, 25 bp, Homo sapien
cctctgctgcgagtatgaccagctc

SEQ ID NO: 6092854 - DNA, 25 bp, Homo sapien
tggacaccgcgcagatggcaatgat

SEQ ID NO: 6092855 - DNA, 25 bp, Homo sapien
ccagggcacgcgttgtgctgatctc

SEQ ID NO: 6092856 - DNA, 25 bp, Homo sapien
tgctgatctcgccagtgtacagccc

SEQ ID NO: 6092857 - DNA, 25 bp, Homo sapien
tggcaatgatcaggtatacgttgac

SEQ ID NO: 6092858 - DNA, 25 bp, Homo sapien
tctccacaagtgacaccagcacagt

SEQ ID NO: 6092859 - DNA, 25 bp, Homo sapien
agtgccagtggctgaacacatttca

SEQ ID NO: 6092860 - DNA, 25 bp, Homo sapien
tggttggatcctggaactgcaggta

SEQ ID NO: 6092861 - DNA, 25 bp, Homo sapien
aactcactattaccagtgccagtgg

SEQ ID NO: 6092862 - DNA, 25 bp, Homo sapien
tggttggccgtgatcctgaacaaga

SEQ ID NO: 6092863 - DNA, 25 bp, Homo sapien
aaagccatctaccagcaggatgttg

SEQ ID NO: 6092864 - DNA, 25 bp, Homo sapien
caaggccgagataaggatccattgc

SEQ ID NO: 6092865 - DNA, 25 bp, Homo sapien
taatgaagatcactatgacagagag

SEQ ID NO: 6092866 - DNA, 25 bp, Homo sapien
cacatttcatatggacaaggccgag

SEQ ID NO: 6092867 - DNA, 25 bp, Homo sapien
gaaagagctggttggccgtgatcct

SEQ ID NO: 6092868 - DNA, 25 bp, Homo sapien
gcttaagaaagcgaaactcactatt

SEQ ID NO: 6092869 - DNA, 25 bp, Homo sapien
ggatggatttacctttctagaatgc

SEQ ID NO: 6092870 - DNA, 25 bp, Homo sapien
tctgccttaatgtatggatttctcc

SEQ ID NO: 6092871 - DNA, 25 bp, Homo sapien
aaaattggggataatcggcttcaga

SEQ ID NO: 6092872 - DNA, 25 bp, Homo sapien
tgaacttgaaaattggggataatcg

SEQ ID NO: 6092873 - DNA, 25 bp, Homo sapien
aatcggcttcagaaatttgaactca

SEQ ID NO: 6092874 - DNA, 25 bp, Homo sapien
tattcctaccagtgtcatgaacttg

SEQ ID NO: 6092875 - DNA, 25 bp, Homo sapien
catattcctaccagtgtcatgaact

SEQ ID NO: 6092876 - DNA, 25 bp, Homo sapien
taatcggcttcagaaatttgaactc

SEQ ID NO: 6092877 - DNA, 25 bp, Homo sapien
ataatcggcttcagaaatttgaact

SEQ ID NO: 6092878 - DNA, 25 bp, Homo sapien
gggataatcggcttcagaaatttga

SEQ ID NO: 6092879 - DNA, 25 bp, Homo sapien
gataatcggcttcagaaatttgaac

SEQ ID NO: 6092880 - DNA, 25 bp, Homo sapien
ggataatcggcttcagaaatttgaa

SEQ ID NO: 6092881 - DNA, 25 bp, Homo sapien
ttgaaaattggggataatcggcttc

SEQ ID NO: 6092882 - DNA, 25 bp, Homo sapien
aattggggataatcggcttcagaaa

SEQ ID NO: 6092883 - DNA, 25 bp, Homo sapien
cctgagcaacgaagttggggataat

SEQ ID NO: 6092884 - DNA, 25 bp, Homo sapien
ctgcaccctgagcaacgaagttggg

SEQ ID NO: 6092885 - DNA, 25 bp, Homo sapien
ctctctgcaccctgagcaacgaagt

SEQ ID NO: 6092886 - DNA, 25 bp, Homo sapien
ctgagcaacgaagttggggataatt

SEQ ID NO: 6092887 - DNA, 25 bp, Homo sapien
ctctgcaccctgagcaacgaagttg

SEQ ID NO: 6092888 - DNA, 25 bp, Homo sapien
ggatttgcctcgctaaccctctctg

SEQ ID NO: 6092889 - DNA, 25 bp, Homo sapien
tctctgcaccctgagcaacgaagtt

SEQ ID NO: 6092890 - DNA, 25 bp, Homo sapien
gggatttgcctcgctaaccctctct

SEQ ID NO: 6092891 - DNA, 25 bp, Homo sapien
tgagcaacgaagttggggataattg

SEQ ID NO: 6092892 - DNA, 25 bp, Homo sapien
tctgcaccctgagcaacgaagttgg

SEQ ID NO: 6092893 - DNA, 25 bp, Homo sapien
agcaacgaagttggggataattggc

SEQ ID NO: 6092894 - DNA, 25 bp, Homo sapien
ccctgagcaacgaagttggggataa

SEQ ID NO: 6092895 - DNA, 25 bp, Homo sapien
accacgagatagagtgtgaggcccg

SEQ ID NO: 6092896 - DNA, 25 bp, Homo sapien
tcctggacgaccactacaagcctct

SEQ ID NO: 6092897 - DNA, 25 bp, Homo sapien
gtgctagcagcaccgtgacaaaagc

SEQ ID NO: 6092898 - DNA, 25 bp, Homo sapien
tgtgcagccccactgcaaatagtcc

SEQ ID NO: 6092899 - DNA, 25 bp, Homo sapien
tgacttgtgccagcgtctcagcttg

SEQ ID NO: 6092900 - DNA, 25 bp, Homo sapien
tgtgaggcccgagtcgtctgggtct

SEQ ID NO: 6092901 - DNA, 25 bp, Homo sapien
cccaagtcagccaggacatctggga

SEQ ID NO: 6092902 - DNA, 25 bp, Homo sapien
tctcagcttgagtgctagcagcacc

SEQ ID NO: 6092903 - DNA, 25 bp, Homo sapien
tctgggatgctgtcggccacagcca

SEQ ID NO: 6092904 - DNA, 25 bp, Homo sapien
cacagtgagtgtgacggtggccgag

SEQ ID NO: 6092905 - DNA, 25 bp, Homo sapien
agcagggcccgtgcggtgcgcacct

SEQ ID NO: 6092906 - DNA, 25 bp, Homo sapien
gcttgagtgctagcagcaccgtgac

SEQ ID NO: 6092907 - DNA, 25 bp, Homo sapien
acagctctcttcactaaggagcgtg

SEQ ID NO: 6092908 - DNA, 25 bp, Homo sapien
ttgatactgcctaggtcagccagga

SEQ ID NO: 6092909 - DNA, 25 bp, Homo sapien
gcatctaccttatcagacatcagaa

SEQ ID NO: 6092910 - DNA, 25 bp, Homo sapien
cactaaggagcgtgtctgcgtagtt

SEQ ID NO: 6092911 - DNA, 25 bp, Homo sapien
tctcttcactaaggagcgtgtctgc

SEQ ID NO: 6092912 - DNA, 25 bp, Homo sapien
agcccaaccgcaaagagtcctggct

SEQ ID NO: 6092913 - DNA, 25 bp, Homo sapien
caacggtgaccgtgaaggtggctga

SEQ ID NO: 6092914 - DNA, 25 bp, Homo sapien
gtgtgcagcccaaccgcaaagagtc

SEQ ID NO: 6092915 - DNA, 25 bp, Homo sapien
gggtcttgatactgcctaggtcagc

SEQ ID NO: 6092916 - DNA, 25 bp, Homo sapien
catggtcttcgacggccaccacgag

SEQ ID NO: 6092917 - DNA, 25 bp, Homo sapien
taccttatcagacatcagaagaggc

SEQ ID NO: 6092918 - DNA, 25 bp, Homo sapien
ggctggccatggtcttcgacggcca

SEQ ID NO: 6092919 - DNA, 25 bp, Homo sapien
cctggttgataagcgtgtcggcata

SEQ ID NO: 6092920 - DNA, 25 bp, Homo sapien
accgccaccaccaggtacagagtga

SEQ ID NO: 6092921 - DNA, 25 bp, Homo sapien
tgactcttacgcgagtctgcagtga

SEQ ID NO: 6092922 - DNA, 25 bp, Homo sapien
tcatagctctcctggttgataagcg

SEQ ID NO: 6092923 - DNA, 25 bp, Homo sapien
ccacggccacggtgagcgtgacagt

SEQ ID NO: 6092924 - DNA, 25 bp, Homo sapien
tacagagtgaggtccgaatcgttgg

SEQ ID NO: 6092925 - DNA, 25 bp, Homo sapien
aaatcagatgactcttacgcgagtc

SEQ ID NO: 6092926 - DNA, 25 bp, Homo sapien
cgagccgggcatgctcgctaagcca

SEQ ID NO: 6092927 - DNA, 25 bp, Homo sapien
tgtgcaggcccactgagaaaagtcc

SEQ ID NO: 6092928 - DNA, 25 bp, Homo sapien
cgtggtcctggacggccaccactag

SEQ ID NO: 6092929 - DNA, 25 bp, Homo sapien
ccacaaagtgcgagccgggcatgct

SEQ ID NO: 6092930 - DNA, 25 bp, Homo sapien
tgccagcgctgcagtctgagcgcca

SEQ ID NO: 6092931 - DNA, 25 bp, Homo sapien
cagatgcgaggagtgccagtgcctc

SEQ ID NO: 6092932 - DNA, 25 bp, Homo sapien
ctgtaggaaagctcgaaccccatct

SEQ ID NO: 6092933 - DNA, 25 bp, Homo sapien
cacaacgaggtagagggtaaggtct

SEQ ID NO: 6092934 - DNA, 25 bp, Homo sapien
cgagctgtgcgcacttcacctgtgt

SEQ ID NO: 6092935 - DNA, 25 bp, Homo sapien
gccagcagcgtgataacgaaggtga

SEQ ID NO: 6092936 - DNA, 25 bp, Homo sapien
gcatctctatctagcagggcccgag

SEQ ID NO: 6092937 - DNA, 25 bp, Homo sapien
ccacaaggctctgtttgagcgcatc

SEQ ID NO: 6092938 - DNA, 25 bp, Homo sapien
gaatcaacagagacgcacaaaggct

SEQ ID NO: 6092939 - DNA, 25 bp, Homo sapien
gatctgaagactgcccaggtcagcc

SEQ ID NO: 6092940 - DNA, 25 bp, Homo sapien
actggtagcccgcagcagatgcgag

SEQ ID NO: 6092941 - DNA, 25 bp, Homo sapien
cagctatggctactgtgagcgtgac

SEQ ID NO: 6092942 - DNA, 25 bp, Homo sapien
tacacccacaaagtgtgaggtgggc

SEQ ID NO: 6092943 - DNA, 25 bp, Homo sapien
gctcgctggcctgcacaatgtggta

SEQ ID NO: 6092944 - DNA, 25 bp, Homo sapien
ggagaactccaggtacagtcttgaa

SEQ ID NO: 6092945 - DNA, 25 bp, Homo sapien
catagaagatcttgtggtgcagcat

SEQ ID NO: 6092946 - DNA, 25 bp, Homo sapien
gcaaagtcctttcgctgtaggtggg

SEQ ID NO: 6092947 - DNA, 25 bp, Homo sapien
gaagcagacaccaggctgaaagtag

SEQ ID NO: 6092948 - DNA, 25 bp, Homo sapien
tgcgaagattaggtgcagcatgacg

SEQ ID NO: 6092949 - DNA, 25 bp, Homo sapien
gagattgccagaatcaccgcgagga

SEQ ID NO: 6092950 - DNA, 25 bp, Homo sapien
tgctgtcctccatcacgcacagtga

SEQ ID NO: 6092951 - DNA, 25 bp, Homo sapien
gcggtcgctaaggtcaggttgtatc

SEQ ID NO: 6092952 - DNA, 25 bp, Homo sapien
gaatgtgaggcagcacacggattgt

SEQ ID NO: 6092953 - DNA, 25 bp, Homo sapien
tgaaagtagccctcagtggcgggtc

SEQ ID NO: 6092954 - DNA, 25 bp, Homo sapien
aaggccaacgccactactaggtgaa

SEQ ID NO: 6092955 - DNA, 25 bp, Homo sapien
tgtcgcctaaggcacgcgctgtgcg

SEQ ID NO: 6092956 - DNA, 25 bp, Homo sapien
tcatggccacgaggaagagcactga

SEQ ID NO: 6092957 - DNA, 25 bp, Homo sapien
cacggattcggatttaacacagaga

SEQ ID NO: 6092958 - DNA, 25 bp, Homo sapien
ggtcagtgatatccggcagcacctc

SEQ ID NO: 6092959 - DNA, 25 bp, Homo sapien
cgtcgcaggcgcaaggcaatggcca

SEQ ID NO: 6092960 - DNA, 25 bp, Homo sapien
tggtggctgtccaccgtcacgcacg

SEQ ID NO: 6092961 - DNA, 25 bp, Homo sapien
taaactccgtctttcctgtatgtgc

SEQ ID NO: 6092962 - DNA, 25 bp, Homo sapien
tatgtgcaacacatagattgtagga

SEQ ID NO: 6092963 - DNA, 25 bp, Homo sapien
tgtcggcgaagaccaggtgcaacgt

SEQ ID NO: 6092964 - DNA, 25 bp, Homo sapien
acctcctgcaagctgtcggcgaaga

SEQ ID NO: 6092965 - DNA, 25 bp, Homo sapien
caaagtatgtcttgtcctgaactca

SEQ ID NO: 6092966 - DNA, 25 bp, Homo sapien
ccagatgaatcaccgcaaagtatgt

SEQ ID NO: 6092967 - DNA, 25 bp, Homo sapien
aagcctcatcttctagcataaagtc

SEQ ID NO: 6092968 - DNA, 25 bp, Homo sapien
acactgggcctagggagggctcgaa

SEQ ID NO: 6092969 - DNA, 25 bp, Homo sapien
aaagtcaaataagcctctctgttga

SEQ ID NO: 6092970 - DNA, 25 bp, Homo sapien
ttctgggcctatcccagaagcctca

SEQ ID NO: 6092971 - DNA, 25 bp, Homo sapien
ccagcccaggaaacttgtgcaagca

SEQ ID NO: 6092972 - DNA, 25 bp, Homo sapien
ctcgaagtcgcggtcatcaggaact

SEQ ID NO: 6092973 - DNA, 25 bp, Homo sapien
gaccactcgaagatggcattgacag

SEQ ID NO: 6092974 - DNA, 25 bp, Homo sapien
tctgttgaaacggtccagcccagga

SEQ ID NO: 6092975 - DNA, 25 bp, Homo sapien
aataagcctctctgttgaaacggtc

SEQ ID NO: 6092976 - DNA, 25 bp, Homo sapien
agtcgcggtcatcaggaacttctgg

SEQ ID NO: 6092977 - DNA, 25 bp, Homo sapien
cttgtgcaagcagaaggaggatgat

SEQ ID NO: 6092978 - DNA, 25 bp, Homo sapien
tcgaagatggcattgacagcggaag

SEQ ID NO: 6092979 - DNA, 25 bp, Homo sapien
taccgtggagaatcccgtggatctc

SEQ ID NO: 6092980 - DNA, 25 bp, Homo sapien
tgagggcagcgtatactttggttac

SEQ ID NO: 6092981 - DNA, 25 bp, Homo sapien
tgcccgcattgcaatggtgcatcga

SEQ ID NO: 6092982 - DNA, 25 bp, Homo sapien
taaaggcacccggaatctactccga

SEQ ID NO: 6092983 - DNA, 25 bp, Homo sapien
gcaactacatagaacctccttcctg

SEQ ID NO: 6092984 - DNA, 25 bp, Homo sapien
gaatctactccgatgacaattgttg

SEQ ID NO: 6092985 - DNA, 25 bp, Homo sapien
gaatcccgtggatctctgttgtcac

SEQ ID NO: 6092986 - DNA, 25 bp, Homo sapien
tgtgcacctggatttatgaggtcac

SEQ ID NO: 6092987 - DNA, 25 bp, Homo sapien
tggaaccacaggataccgtggagaa

SEQ ID NO: 6092988 - DNA, 25 bp, Homo sapien
catcgataattgttaattgcccgca

SEQ ID NO: 6092989 - DNA, 25 bp, Homo sapien
aaccactgagccctcgtaaactgtg

SEQ ID NO: 6092990 - DNA, 25 bp, Homo sapien
tggtttttgcaacgccatcgataat

SEQ ID NO: 6092991 - DNA, 25 bp, Homo sapien
ccagggctgaaaggccttggattca

SEQ ID NO: 6092992 - DNA, 25 bp, Homo sapien
aggcatgtcccagatggctgtacat

SEQ ID NO: 6092993 - DNA, 25 bp, Homo sapien
tctgccagacatattcgaagtcctg

SEQ ID NO: 6092994 - DNA, 25 bp, Homo sapien
aggtcactttcgtccttcccgagag

SEQ ID NO: 6092995 - DNA, 25 bp, Homo sapien
cagtcccatagttgactggagccca

SEQ ID NO: 6092996 - DNA, 25 bp, Homo sapien
cttgctccacaaaattctgccagac

SEQ ID NO: 6092997 - DNA, 25 bp, Homo sapien
tccagtatgattggttggtgtcaaa

SEQ ID NO: 6092998 - DNA, 25 bp, Homo sapien
gcattagagagagagtcacagccta

SEQ ID NO: 6092999 - DNA, 25 bp, Homo sapien
caagtcctctaagggccttgtccag

SEQ ID NO: 6093000 - DNA, 25 bp, Homo sapien
ggtgtcaaatgttgtccagctccaa

SEQ ID NO: 6093001 - DNA, 25 bp, Homo sapien
tcatgatgcgcagtttacagccagc

SEQ ID NO: 6093002 - DNA, 25 bp, Homo sapien
ggtgagcaattaggaccttcagtcc

SEQ ID NO: 6093003 - DNA, 25 bp, Homo sapien
gattgggagcttatgaggcagccct

SEQ ID NO: 6093004 - DNA, 25 bp, Homo sapien
caggcagtttgattctccctgactg

SEQ ID NO: 6093005 - DNA, 25 bp, Homo sapien
ttcgctccgctttagacagggctcc

SEQ ID NO: 6093006 - DNA, 25 bp, Homo sapien
cagtgcccgaggtgggcagagaacc

SEQ ID NO: 6093007 - DNA, 25 bp, Homo sapien
gtggctgttgaagcccatgtagatc

SEQ ID NO: 6093008 - DNA, 25 bp, Homo sapien
ttcaggcctgggcctcccactgagg

SEQ ID NO: 6093009 - DNA, 25 bp, Homo sapien
gcgagtctttcctaaaagatgatgg

SEQ ID NO: 6093010 - DNA, 25 bp, Homo sapien
gcctgcctagatctgggacaccatg

SEQ ID NO: 6093011 - DNA, 25 bp, Homo sapien
ggctgaggctgaggctgagggtggc

SEQ ID NO: 6093012 - DNA, 25 bp, Homo sapien
ggtgactcttcaggcctgggcctcc

SEQ ID NO: 6093013 - DNA, 25 bp, Homo sapien
ccgctttagacagggctcctctaac

SEQ ID NO: 6093014 - DNA, 25 bp, Homo sapien
tgtggcggctcgagaggctgccgtc

SEQ ID NO: 6093015 - DNA, 25 bp, Homo sapien
agtaccagaccccagcgagtctttc

SEQ ID NO: 6093016 - DNA, 25 bp, Homo sapien
gcctcccactgagggttaggctgag

SEQ ID NO: 6093017 - DNA, 25 bp, Homo sapien
cccatgtagatccaggggttgcagc

SEQ ID NO: 6093018 - DNA, 25 bp, Homo sapien
ctagatctgggacaccatgtgtgca

SEQ ID NO: 6093019 - DNA, 25 bp, Homo sapien
agaggctgccgtcggagagccgccg

SEQ ID NO: 6093020 - DNA, 25 bp, Homo sapien
agaacctccactagtcctgggggca

SEQ ID NO: 6093021 - DNA, 25 bp, Homo sapien
cattctggccttttcgctccgcttt

SEQ ID NO: 6093022 - DNA, 25 bp, Homo sapien
ggctcgagaggctgccgtcggagag

SEQ ID NO: 6093023 - DNA, 25 bp, Homo sapien
gtcctgggggcagtaccagacccca

SEQ ID NO: 6093024 - DNA, 25 bp, Homo sapien
taacaggtggctgttgaagcccatg

SEQ ID NO: 6093025 - DNA, 25 bp, Homo sapien
ttgaagcccatgtagatccaggggt

SEQ ID NO: 6093026 - DNA, 25 bp, Homo sapien
tccaagtcccttggtgactcttcag

SEQ ID NO: 6093027 - DNA, 25 bp, Homo sapien
ggctggggacccccacagcaggcaa

SEQ ID NO: 6093028 - DNA, 25 bp, Homo sapien
tgaatatggcaggaccagggagaca

SEQ ID NO: 6093029 - DNA, 25 bp, Homo sapien
ccttccccatctgccagctccaagt

SEQ ID NO: 6093030 - DNA, 25 bp, Homo sapien
ggcaaggtgacgcaggggccgcggt

SEQ ID NO: 6093031 - DNA, 25 bp, Homo sapien
caggggccgcggtaacaggtggctg

SEQ ID NO: 6093032 - DNA, 25 bp, Homo sapien
tagacagggctcctctaactccaac

SEQ ID NO: 6093033 - DNA, 25 bp, Homo sapien
ggctgagggtggccgggcagctgga

SEQ ID NO: 6093034 - DNA, 25 bp, Homo sapien
caccatgtgtgcatggacaccctat

SEQ ID NO: 6093035 - DNA, 25 bp, Homo sapien
ctcccagctctcatttccagtgccc

SEQ ID NO: 6093036 - DNA, 25 bp, Homo sapien
tcctaggcctgcctagatctgggac

SEQ ID NO: 6093037 - DNA, 25 bp, Homo sapien
ccatctgccagctccaagtcccttg

SEQ ID NO: 6093038 - DNA, 25 bp, Homo sapien
accctatgaatatggcaggaccagg

SEQ ID NO: 6093039 - DNA, 25 bp, Homo sapien
tcagcagcgtggtgtggcggctcga

SEQ ID NO: 6093040 - DNA, 25 bp, Homo sapien
gccagctccaagtcccttggtgact

SEQ ID NO: 6093041 - DNA, 25 bp, Homo sapien
ccgcggtaacaggtggctgttgaag

SEQ ID NO: 6093042 - DNA, 25 bp, Homo sapien
atggacaccctatgaatatggcagg

SEQ ID NO: 6093043 - DNA, 25 bp, Homo sapien
gtgacgcaggggccgcggtaacagg

SEQ ID NO: 6093044 - DNA, 25 bp, Homo sapien
gcgtggtgtggcggctcgagaggct

SEQ ID NO: 6093045 - DNA, 25 bp, Homo sapien
cttaccctcccagctctcatttcca

SEQ ID NO: 6093046 - DNA, 25 bp, Homo sapien
cagaccccagcgagtctttcctaaa

SEQ ID NO: 6093047 - DNA, 25 bp, Homo sapien
tgacaccagggtaggggacccattc

SEQ ID NO: 6093048 - DNA, 25 bp, Homo sapien
tagatccaggggttgcagcagctgt

SEQ ID NO: 6093049 - DNA, 25 bp, Homo sapien
agctctcatttccagtgcccgaggt

SEQ ID NO: 6093050 - DNA, 25 bp, Homo sapien
tctcagcggtgccttccccatctgc

SEQ ID NO: 6093051 - DNA, 25 bp, Homo sapien
ggccttttcgctccgctttagacag

SEQ ID NO: 6093052 - DNA, 25 bp, Homo sapien
tgactgccagtgtctgagattggga

SEQ ID NO: 6093053 - DNA, 25 bp, Homo sapien
cagggtaggggacccattctggcct

SEQ ID NO: 6093054 - DNA, 25 bp, Homo sapien
tcctgggctggggacccccacagca

SEQ ID NO: 6093055 - DNA, 25 bp, Homo sapien
tgccgtcggagagccgccggcgcat

SEQ ID NO: 6093056 - DNA, 25 bp, Homo sapien
cagccctcacactaggggcagctgt

SEQ ID NO: 6093057 - DNA, 25 bp, Homo sapien
tcggagagccgccggcgcatcctgg

SEQ ID NO: 6093058 - DNA, 25 bp, Homo sapien
ggcaggaccagggagacaggcagtt

SEQ ID NO: 6093059 - DNA, 25 bp, Homo sapien
gcctgggcctcccactgagggttag

SEQ ID NO: 6093060 - DNA, 25 bp, Homo sapien
gggcagagaacctccactagtcctg

SEQ ID NO: 6093061 - DNA, 25 bp, Homo sapien
ggctgaggctgagggtggccgggca

SEQ ID NO: 6093062 - DNA, 25 bp, Homo sapien
gggtggccgggcagctggagcgggt

SEQ ID NO: 6093063 - DNA, 25 bp, Homo sapien
ctgggacaccatgtgtgcatggaca

SEQ ID NO: 6093064 - DNA, 25 bp, Homo sapien
gtttgattctccctgactgccagtg

SEQ ID NO: 6093065 - DNA, 25 bp, Homo sapien
tctgagattgggagcttatgaggca

SEQ ID NO: 6093066 - DNA, 25 bp, Homo sapien
tccactagtcctgggggcagtacca

SEQ ID NO: 6093067 - DNA, 25 bp, Homo sapien
agccgccggcgcatcctgggctggg

SEQ ID NO: 6093068 - DNA, 25 bp, Homo sapien
gggacccccacagcaggcaaggtga

SEQ ID NO: 6093069 - DNA, 25 bp, Homo sapien
gggagacaggcagtttgattctccc

SEQ ID NO: 6093070 - DNA, 25 bp, Homo sapien
cccacagcaggcaaggtgacgcagg

SEQ ID NO: 6093071 - DNA, 25 bp, Homo sapien
catttccagtgcccgaggtgggcag

SEQ ID NO: 6093072 - DNA, 25 bp, Homo sapien
cagctgtgacaccagggtaggggac

SEQ ID NO: 6093073 - DNA, 25 bp, Homo sapien
tcacactaggggcagctgtgacacc

SEQ ID NO: 6093074 - DNA, 25 bp, Homo sapien
taaaagatgatggtctcagcggtgc

SEQ ID NO: 6093075 - DNA, 25 bp, Homo sapien
ccgaggtgggcagagaacctccact

SEQ ID NO: 6093076 - DNA, 25 bp, Homo sapien
gggttaggctgaggctgaggctgag

SEQ ID NO: 6093077 - DNA, 25 bp, Homo sapien
atgatggtctcagcggtgccttccc

SEQ ID NO: 6093078 - DNA, 25 bp, Homo sapien
atgaggcagccctcacactaggggc

SEQ ID NO: 6093079 - DNA, 25 bp, Homo sapien
gggacccattctggccttttcgctc

SEQ ID NO: 6093080 - DNA, 25 bp, Homo sapien
gagcttatgaggcagccctcacact

SEQ ID NO: 6093081 - DNA, 25 bp, Homo sapien
cggtgccttccccatctgccagctc

SEQ ID NO: 6093082 - DNA, 25 bp, Homo sapien
gaccagggagacaggcagtttgatt

SEQ ID NO: 6093083 - DNA, 25 bp, Homo sapien
agcgggtcagcagcgtggtgtggcg

SEQ ID NO: 6093084 - DNA, 25 bp, Homo sapien
ccaacccttaccctcccagctctca

SEQ ID NO: 6093085 - DNA, 25 bp, Homo sapien
gtgtgcatggacaccctatgaatat

SEQ ID NO: 6093086 - DNA, 25 bp, Homo sapien
ctttcctaaaagatgatggtctcag

SEQ ID NO: 6093087 - DNA, 25 bp, Homo sapien
ccagtgtctgagattgggagcttat

SEQ ID NO: 6093088 - DNA, 25 bp, Homo sapien
ggggcagtaccagaccccagcgagt

SEQ ID NO: 6093089 - DNA, 25 bp, Homo sapien
ccgggcagctggagcgggtcagcag

SEQ ID NO: 6093090 - DNA, 25 bp, Homo sapien
agctggagcgggtcagcagcgtggt

SEQ ID NO: 6093091 - DNA, 25 bp, Homo sapien
taggggcagctgtgacaccagggta

SEQ ID NO: 6093092 - DNA, 25 bp, Homo sapien
ttctccctgactgccagtgtctgag

SEQ ID NO: 6093093 - DNA, 25 bp, Homo sapien
cactgagggttaggctgaggctgag

SEQ ID NO: 6093094 - DNA, 25 bp, Homo sapien
tcccttggtgactcttcaggcctgg

SEQ ID NO: 6093095 - DNA, 25 bp, Homo sapien
ccccagcgagtctttcctaaaagat

SEQ ID NO: 6093096 - DNA, 25 bp, Homo sapien
caacgatgtacaacagaggggaaat

SEQ ID NO: 6093097 - DNA, 25 bp, Homo sapien
gagtccagcaatgactgaccggccc

SEQ ID NO: 6093098 - DNA, 25 bp, Homo sapien
caacatgatccatgggaaaacccct

SEQ ID NO: 6093099 - DNA, 25 bp, Homo sapien
ccctggccactactcccaaatgctt

SEQ ID NO: 6093100 - DNA, 25 bp, Homo sapien
ccagagtccagcaatgactgaccgg

SEQ ID NO: 6093101 - DNA, 25 bp, Homo sapien
ggtctggttcacttatacaacatga

SEQ ID NO: 6093102 - DNA, 25 bp, Homo sapien
gcttgtttccaagtggatgagaacg

SEQ ID NO: 6093103 - DNA, 25 bp, Homo sapien
ccaacctggaagcttgtggacacca

SEQ ID NO: 6093104 - DNA, 25 bp, Homo sapien
tacaacatgatccatgggaaaaccc

SEQ ID NO: 6093105 - DNA, 25 bp, Homo sapien
agctccgtggctagcgtccagggcc

SEQ ID NO: 6093106 - DNA, 25 bp, Homo sapien
tcagggtggtctggttcacttatac

SEQ ID NO: 6093107 - DNA, 25 bp, Homo sapien
tccaagtggatgagaacgccagtgt

SEQ ID NO: 6093108 - DNA, 25 bp, Homo sapien
ggtgtgtaccctcatgcctggctaa

SEQ ID NO: 6093109 - DNA, 25 bp, Homo sapien
tttatctgcagggaaacctttctga

SEQ ID NO: 6093110 - DNA, 25 bp, Homo sapien
gatctttaaaagtttatctgcaggg

SEQ ID NO: 6093111 - DNA, 25 bp, Homo sapien
ccgtccacaggttgagatctttaaa

SEQ ID NO: 6093112 - DNA, 25 bp, Homo sapien
caaatcacatttaccacattccgga

SEQ ID NO: 6093113 - DNA, 25 bp, Homo sapien
cacatttcccgtccacaggttgaga

SEQ ID NO: 6093114 - DNA, 25 bp, Homo sapien
gcactcgggacagggcctcctctgt

SEQ ID NO: 6093115 - DNA, 25 bp, Homo sapien
tgtctctttggttttccaaatcaca

SEQ ID NO: 6093116 - DNA, 25 bp, Homo sapien
tattctccaccatcatgtctctttg

SEQ ID NO: 6093117 - DNA, 25 bp, Homo sapien
gaaacctttctgacaactctcctta

SEQ ID NO: 6093118 - DNA, 25 bp, Homo sapien
ctgggactacaggtgtgtaccctca

SEQ ID NO: 6093119 - DNA, 25 bp, Homo sapien
tgcccaggctgctctcaaacttctg

SEQ ID NO: 6093120 - DNA, 25 bp, Homo sapien
cattgccgtctgcagatgtcttctg

SEQ ID NO: 6093121 - DNA, 25 bp, Homo sapien
ttgtcgcggaggagctgcatgatga

SEQ ID NO: 6093122 - DNA, 25 bp, Homo sapien
cttttctctccggtggccacttcag

SEQ ID NO: 6093123 - DNA, 25 bp, Homo sapien
tggccaagtggcacgcttgctctgg

SEQ ID NO: 6093124 - DNA, 25 bp, Homo sapien
ggcgtgcccccacaacgttcttgta

SEQ ID NO: 6093125 - DNA, 25 bp, Homo sapien
cggtcttggccaagtggcacgcttg

SEQ ID NO: 6093126 - DNA, 25 bp, Homo sapien
cctcgttgagggtgtcaagctcggc

SEQ ID NO: 6093127 - DNA, 25 bp, Homo sapien
tcgtactgggtctcgctgcaattct

SEQ ID NO: 6093128 - DNA, 25 bp, Homo sapien
tagaagacggagtagttaagagcca

SEQ ID NO: 6093129 - DNA, 25 bp, Homo sapien
cagacagaaggtttcgttcctcatt

SEQ ID NO: 6093130 - DNA, 25 bp, Homo sapien
tccggtggccacttcagccaggtag

SEQ ID NO: 6093131 - DNA, 25 bp, Homo sapien
ggtacgcacggaccatctcaatctt

SEQ ID NO: 6093132 - DNA, 25 bp, Homo sapien
tcttgtacaggtagttatccaccag

SEQ ID NO: 6093133 - DNA, 25 bp, Homo sapien
attcttgtacaggtagttatccacc

SEQ ID NO: 6093134 - DNA, 25 bp, Homo sapien
gtacaggtagttatccaccaggctc

SEQ ID NO: 6093135 - DNA, 25 bp, Homo sapien
gtacaaatctttgcgctcgtactgg

SEQ ID NO: 6093136 - DNA, 25 bp, Homo sapien
aatctttgcgctcgtactgggtctc

SEQ ID NO: 6093137 - DNA, 25 bp, Homo sapien
ggtacaaatctttgcgctcgtactg

SEQ ID NO: 6093138 - DNA, 25 bp, Homo sapien
ttgtacaggtagttatccaccaggc

SEQ ID NO: 6093139 - DNA, 25 bp, Homo sapien
caaatctttgcgctcgtactgggtc

SEQ ID NO: 6093140 - DNA, 25 bp, Homo sapien
tgtacaggtagttatccaccaggct

SEQ ID NO: 6093141 - DNA, 25 bp, Homo sapien
caggtacaaatctttgcgctcgtac

SEQ ID NO: 6093142 - DNA, 25 bp, Homo sapien
aaatctttgcgctcgtactgggtct

SEQ ID NO: 6093143 - DNA, 25 bp, Homo sapien
cttgtacaggtagttatccaccagg

SEQ ID NO: 6093144 - DNA, 25 bp, Homo sapien
catagtctattccatcgagggtcac

SEQ ID NO: 6093145 - DNA, 25 bp, Homo sapien
catggtgtttgggtatgcaggtcac

SEQ ID NO: 6093146 - DNA, 25 bp, Homo sapien
gttgggcttatgttgcaagtgcaga

SEQ ID NO: 6093147 - DNA, 25 bp, Homo sapien
ctcctgttggcccagccagagactg

SEQ ID NO: 6093148 - DNA, 25 bp, Homo sapien
caggtcactctcacgtctcggtgga

SEQ ID NO: 6093149 - DNA, 25 bp, Homo sapien
gctcagtctttaaagcctcatggtg

SEQ ID NO: 6093150 - DNA, 25 bp, Homo sapien
tctcggtggaggtagatcccctcac

SEQ ID NO: 6093151 - DNA, 25 bp, Homo sapien
tgtttccagtggtgcaattcccact

SEQ ID NO: 6093152 - DNA, 25 bp, Homo sapien
tgccattttccttgctcattgagat

SEQ ID NO: 6093153 - DNA, 25 bp, Homo sapien
caagtgcagagcaacctgcagaggc

SEQ ID NO: 6093154 - DNA, 25 bp, Homo sapien
cctgggcgttttgaatgttgtgaga

SEQ ID NO: 6093155 - DNA, 25 bp, Homo sapien
tgtacattccactttctccctgagc

SEQ ID NO: 6093156 - DNA, 25 bp, Homo sapien
acagtgaggtctaagaagtagttca

SEQ ID NO: 6093157 - DNA, 25 bp, Homo sapien
ttttgaataagctgatgtgttagaa

SEQ ID NO: 6093158 - DNA, 25 bp, Homo sapien
tcaaaaatgagcagcttgcaaatct

SEQ ID NO: 6093159 - DNA, 25 bp, Homo sapien
tactagtcttcaactaaaaagtcac

SEQ ID NO: 6093160 - DNA, 25 bp, Homo sapien
aataagctgatgtgttagaatagac

SEQ ID NO: 6093161 - DNA, 25 bp, Homo sapien
gtgaggtctaagaagtagttcagtc

SEQ ID NO: 6093162 - DNA, 25 bp, Homo sapien
gaatagacatgctcctatcccatgc

SEQ ID NO: 6093163 - DNA, 25 bp, Homo sapien
cagtggaagaacatatataaggtga

SEQ ID NO: 6093164 - DNA, 25 bp, Homo sapien
cacagtggaagaacatatataaggt

SEQ ID NO: 6093165 - DNA, 25 bp, Homo sapien
tgatgtgttagaatagacatgctcc

SEQ ID NO: 6093166 - DNA, 25 bp, Homo sapien
gacatgctcctatcccatgcaaaaa

SEQ ID NO: 6093167 - DNA, 25 bp, Homo sapien
gctcctatcccatgcaaaaagctgt

SEQ ID NO: 6093168 - DNA, 25 bp, Homo sapien
gctcaggccggtgatctcgctggcc

SEQ ID NO: 6093169 - DNA, 25 bp, Homo sapien
tgcgcttggctctgcccggaagtag

SEQ ID NO: 6093170 - DNA, 25 bp, Homo sapien
cagggtgtgcacgtcgccctcggct

SEQ ID NO: 6093171 - DNA, 25 bp, Homo sapien
caccagactcgtcgtgctccgggtt

SEQ ID NO: 6093172 - DNA, 25 bp, Homo sapien
aatcataatcaaagccattgtgggc

SEQ ID NO: 6093173 - DNA, 25 bp, Homo sapien
aagaggctgccgaggctgtaaccct

SEQ ID NO: 6093174 - DNA, 25 bp, Homo sapien
tacatgggctcgatgtgggcccacc

SEQ ID NO: 6093175 - DNA, 25 bp, Homo sapien
gcaatactagggcaccagactcgtc

SEQ ID NO: 6093176 - DNA, 25 bp, Homo sapien
caagtacatgggctcgatgtgggcc

SEQ ID NO: 6093177 - DNA, 25 bp, Homo sapien
gatctcgctggccttggcagtgaag

SEQ ID NO: 6093178 - DNA, 25 bp, Homo sapien
tctccagggaggagcggtggacagc

SEQ ID NO: 6093179 - DNA, 25 bp, Homo sapien
tgccgaggctgtaaccctggcggcc

SEQ ID NO: 6093180 - DNA, 25 bp, Homo sapien
aacaatatgtgagccgaacatcacc

SEQ ID NO: 6093181 - DNA, 25 bp, Homo sapien
acaatatgtgagccgaacatcacca

SEQ ID NO: 6093182 - DNA, 25 bp, Homo sapien
acaaaactgcaaatacagctccgga

SEQ ID NO: 6093183 - DNA, 25 bp, Homo sapien
atatgtgagccgaacatcaccaatg

SEQ ID NO: 6093184 - DNA, 25 bp, Homo sapien
caatatgtgagccgaacatcaccaa

SEQ ID NO: 6093185 - DNA, 25 bp, Homo sapien
atgtgagccgaacatcaccaatgcc

SEQ ID NO: 6093186 - DNA, 25 bp, Homo sapien
aatatgtgagccgaacatcaccaat

SEQ ID NO: 6093187 - DNA, 25 bp, Homo sapien
tatgtgagccgaacatcaccaatgc

SEQ ID NO: 6093188 - DNA, 25 bp, Homo sapien
ccattttcctcgtcagcaggggcgt

SEQ ID NO: 6093189 - DNA, 25 bp, Homo sapien
cattttcctcgtcagcaggggcgtc

SEQ ID NO: 6093190 - DNA, 25 bp, Homo sapien
cccattttcctcgtcagcaggggcg

SEQ ID NO: 6093191 - DNA, 25 bp, Homo sapien
tgagggacagggtctccgaaggctt

SEQ ID NO: 6093192 - DNA, 25 bp, Homo sapien
gagggacagggtctccgaaggcttc

SEQ ID NO: 6093193 - DNA, 25 bp, Homo sapien
agggacagggtctccgaaggcttca

SEQ ID NO: 6093194 - DNA, 25 bp, Homo sapien
gacctcctgttatatgtctaggact

SEQ ID NO: 6093195 - DNA, 25 bp, Homo sapien
tgtctaggacttatagccctcctcg

SEQ ID NO: 6093196 - DNA, 25 bp, Homo sapien
tacgacctcctgttatatgtctagg

SEQ ID NO: 6093197 - DNA, 25 bp, Homo sapien
ggttgtaattggtacttccactatc

SEQ ID NO: 6093198 - DNA, 25 bp, Homo sapien
gacttatagccctcctcgtacaata

SEQ ID NO: 6093199 - DNA, 25 bp, Homo sapien
tatgtctaggacttatagccctcct

SEQ ID NO: 6093200 - DNA, 25 bp, Homo sapien
tagccctcctcgtacaataatacac

SEQ ID NO: 6093201 - DNA, 25 bp, Homo sapien
gcgaagtacgacctcctgttatatg

SEQ ID NO: 6093202 - DNA, 25 bp, Homo sapien
ggtacttccactatcattaatttct

SEQ ID NO: 6093203 - DNA, 25 bp, Homo sapien
cagacgtccagaccgataaaaactc

SEQ ID NO: 6093204 - DNA, 25 bp, Homo sapien
cccgcgaagtacgacctcctgttat

SEQ ID NO: 6093205 - DNA, 25 bp, Homo sapien
ccagacgtccagaccgataaaaact

SEQ ID NO: 6093206 - DNA, 25 bp, Homo sapien
gatcgaagtaccctccgtgaggtcc

SEQ ID NO: 6093207 - DNA, 25 bp, Homo sapien
tccgtgaggtccccgctacgtgaag

SEQ ID NO: 6093208 - DNA, 25 bp, Homo sapien
gtgaggtccccgctacgtgaaggta

SEQ ID NO: 6093209 - DNA, 25 bp, Homo sapien
tgaggtccccgctacgtgaaggtag

SEQ ID NO: 6093210 - DNA, 25 bp, Homo sapien
gagatcgaagtaccctccgtgaggt

SEQ ID NO: 6093211 - DNA, 25 bp, Homo sapien
gtgaaggtaggggatctttcgcaca

SEQ ID NO: 6093212 - DNA, 25 bp, Homo sapien
tacgtgaaggtaggggatctttcgc

SEQ ID NO: 6093213 - DNA, 25 bp, Homo sapien
tgaaggtaggggatctttcgcacag

SEQ ID NO: 6093214 - DNA, 25 bp, Homo sapien
cgtgaggtccccgctacgtgaaggt

SEQ ID NO: 6093215 - DNA, 25 bp, Homo sapien
gaaggtaggggatctttcgcacagt

SEQ ID NO: 6093216 - DNA, 25 bp, Homo sapien
ccgtgaggtccccgctacgtgaagg

SEQ ID NO: 6093217 - DNA, 25 bp, Homo sapien
agagatcgaagtaccctccgtgagg

SEQ ID NO: 6093218 - DNA, 25 bp, Homo sapien
ggtggctggagactgtgtcaacaca

SEQ ID NO: 6093219 - DNA, 25 bp, Homo sapien
gccaggtttctgttggtaccaggct

SEQ ID NO: 6093220 - DNA, 25 bp, Homo sapien
tggctgggatgccagtggccctgtt

SEQ ID NO: 6093221 - DNA, 25 bp, Homo sapien
gagcctggccaggtttctgttggta

SEQ ID NO: 6093222 - DNA, 25 bp, Homo sapien
tggccctgttggatgcatcatagat

SEQ ID NO: 6093223 - DNA, 25 bp, Homo sapien
ccctgttggatgcatcatagatgag

SEQ ID NO: 6093224 - DNA, 25 bp, Homo sapien
gctggagactgtgtcaacacaattt

SEQ ID NO: 6093225 - DNA, 25 bp, Homo sapien
cagtggccctgttggatgcatcata

SEQ ID NO: 6093226 - DNA, 25 bp, Homo sapien
tgccagtggccctgttggatgcatc

SEQ ID NO: 6093227 - DNA, 25 bp, Homo sapien
ttggtaccaggctaagtagctgcta

SEQ ID NO: 6093228 - DNA, 25 bp, Homo sapien
gtagctgctaacactctgactggcc

SEQ ID NO: 6093229 - DNA, 25 bp, Homo sapien
ggtgagagtgaagtctgtcccagac

SEQ ID NO: 6093230 - DNA, 25 bp, Homo sapien
taagtagctgctaacaccctgactg

SEQ ID NO: 6093231 - DNA, 25 bp, Homo sapien
agtagctgctaacaccctgactggc

SEQ ID NO: 6093232 - DNA, 25 bp, Homo sapien
tgagagtgaagtctgtcccaggccc

SEQ ID NO: 6093233 - DNA, 25 bp, Homo sapien
ggtggctggagactgtgtcaacaca

SEQ ID NO: 6093234 - DNA, 25 bp, Homo sapien
gccagtggccctgttggatgcatca

SEQ ID NO: 6093235 - DNA, 25 bp, Homo sapien
aagtagctgctaacaccctgactgg

SEQ ID NO: 6093236 - DNA, 25 bp, Homo sapien
ccctgttggatgcatcatagatgag

SEQ ID NO: 6093237 - DNA, 25 bp, Homo sapien
gtagctgctaacaccctgactggcc

SEQ ID NO: 6093238 - DNA, 25 bp, Homo sapien
accaggctaagtagctgctaacacc

SEQ ID NO: 6093239 - DNA, 25 bp, Homo sapien
caggctaagtagctgctaacaccct

SEQ ID NO: 6093240 - DNA, 25 bp, Homo sapien
gctaagtagctgctaacaccctgac

SEQ ID NO: 6093241 - DNA, 25 bp, Homo sapien
ggctaagtagctgctaacaccctga

SEQ ID NO: 6093242 - DNA, 25 bp, Homo sapien
taagtagctgctaacaccctgactg

SEQ ID NO: 6093243 - DNA, 25 bp, Homo sapien
ggtggctggagactgtgtcaacaca

SEQ ID NO: 6093244 - DNA, 25 bp, Homo sapien
ggctaagtagctgctaacaccctga

SEQ ID NO: 6093245 - DNA, 25 bp, Homo sapien
cagtggccctgctggatgcatcata

SEQ ID NO: 6093246 - DNA, 25 bp, Homo sapien
gccctgctggatgcatcatagatga

SEQ ID NO: 6093247 - DNA, 25 bp, Homo sapien
accaggctaagtagctgctaacacc

SEQ ID NO: 6093248 - DNA, 25 bp, Homo sapien
tggctgggatgccagtggccctgct

SEQ ID NO: 6093249 - DNA, 25 bp, Homo sapien
caggctaagtagctgctaacaccct

SEQ ID NO: 6093250 - DNA, 25 bp, Homo sapien
tgctggatgcatcatagatgaggag

SEQ ID NO: 6093251 - DNA, 25 bp, Homo sapien
tgagagtgaagtctgtcccaggccc

SEQ ID NO: 6093252 - DNA, 25 bp, Homo sapien
agtagctgctaacaccctgactggc

SEQ ID NO: 6093253 - DNA, 25 bp, Homo sapien
tgccagtggccctgctggatgcatc

SEQ ID NO: 6093254 - DNA, 25 bp, Homo sapien
gccaggtttctgttggtaccaggct

SEQ ID NO: 6093255 - DNA, 25 bp, Homo sapien
ggctaagtagctgctaacactctga

SEQ ID NO: 6093256 - DNA, 25 bp, Homo sapien
ggtggctggagactgtgtcaacaca

SEQ ID NO: 6093257 - DNA, 25 bp, Homo sapien
tagctgctaacactctgactggccc

SEQ ID NO: 6093258 - DNA, 25 bp, Homo sapien
gccagtggccctggtggatgcacca

SEQ ID NO: 6093259 - DNA, 25 bp, Homo sapien
gttggtaccaggctaagtagctgct

SEQ ID NO: 6093260 - DNA, 25 bp, Homo sapien
gagcctggccaggtttctgttggta

SEQ ID NO: 6093261 - DNA, 25 bp, Homo sapien
tggatgcaccatagatgaggagcct

SEQ ID NO: 6093262 - DNA, 25 bp, Homo sapien
ggccaggtttctgttggtaccaggc

SEQ ID NO: 6093263 - DNA, 25 bp, Homo sapien
caccatagatgaggagcctgggagc

SEQ ID NO: 6093264 - DNA, 25 bp, Homo sapien
ggtgagagtgaactctgtcccagac

SEQ ID NO: 6093265 - DNA, 25 bp, Homo sapien
gctggagactgtgtcaacacaattt

SEQ ID NO: 6093266 - DNA, 25 bp, Homo sapien
gaaggctgcacggaatttctgggac

SEQ ID NO: 6093267 - DNA, 25 bp, Homo sapien
aaatggtctgactccttgatgacgc

SEQ ID NO: 6093268 - DNA, 25 bp, Homo sapien
aacagaattacaaccactgccagca

SEQ ID NO: 6093269 - DNA, 25 bp, Homo sapien
gacatgagattgtaaatcaccgggt

SEQ ID NO: 6093270 - DNA, 25 bp, Homo sapien
caccgggttgatggcactgttgaga

SEQ ID NO: 6093271 - DNA, 25 bp, Homo sapien
tcctgtagggcatccataaaagggc

SEQ ID NO: 6093272 - DNA, 25 bp, Homo sapien
tgatgacgctgtaatttagggccac

SEQ ID NO: 6093273 - DNA, 25 bp, Homo sapien
tagggccacactgtagttagcaggt

SEQ ID NO: 6093274 - DNA, 25 bp, Homo sapien
tcattggcacaacataaaagacacc

SEQ ID NO: 6093275 - DNA, 25 bp, Homo sapien
tgagttgacaaccactagagtcctg

SEQ ID NO: 6093276 - DNA, 25 bp, Homo sapien
taaaggatacctcagaagccaagca

SEQ ID NO: 6093277 - DNA, 25 bp, Homo sapien
tatgaatccatagaggacggtagcc

SEQ ID NO: 6093278 - DNA, 25 bp, Homo sapien
tcctcacaatccagtgaggcagtgg

SEQ ID NO: 6093279 - DNA, 25 bp, Homo sapien
tttaagaggcgtgattatgtagtcc

SEQ ID NO: 6093280 - DNA, 25 bp, Homo sapien
tgtagtccaaggtcatgtagccagc

SEQ ID NO: 6093281 - DNA, 25 bp, Homo sapien
agaaccatgtccgaagggctccaaa

SEQ ID NO: 6093282 - DNA, 25 bp, Homo sapien
ccttcctccgataatgttctagtcg

SEQ ID NO: 6093283 - DNA, 25 bp, Homo sapien
tacattgtcgcatatgatcctcaca

SEQ ID NO: 6093284 - DNA, 25 bp, Homo sapien
aagtcaggccgcgttagaaccatgt

SEQ ID NO: 6093285 - DNA, 25 bp, Homo sapien
tgttctacatccatagtctacagcg

SEQ ID NO: 6093286 - DNA, 25 bp, Homo sapien
tagtcgttttcaaatacattgtcgc

SEQ ID NO: 6093287 - DNA, 25 bp, Homo sapien
tagctgtcatcacctcccatttaag

SEQ ID NO: 6093288 - DNA, 25 bp, Homo sapien
caaaacccacagtggatgagtatct

SEQ ID NO: 6093289 - DNA, 25 bp, Homo sapien
tctacagcgactacttcagagtcca

SEQ ID NO: 6093290 - DNA, 25 bp, Homo sapien
ccagggctgaaaggccttggattca

SEQ ID NO: 6093291 - DNA, 25 bp, Homo sapien
aggcatgtcccagatggctgtacat

SEQ ID NO: 6093292 - DNA, 25 bp, Homo sapien
tctgccagacatattcgaagtcctg

SEQ ID NO: 6093293 - DNA, 25 bp, Homo sapien
caagtcctctaagggccttgtccag

SEQ ID NO: 6093294 - DNA, 25 bp, Homo sapien
cagtcccatagttgactggagccca

SEQ ID NO: 6093295 - DNA, 25 bp, Homo sapien
cttgctccacaaaattctgccagac

SEQ ID NO: 6093296 - DNA, 25 bp, Homo sapien
gcattagagagagagtcacagccta

SEQ ID NO: 6093297 - DNA, 25 bp, Homo sapien
tcatgatgcgcagtttacagccagc

SEQ ID NO: 6093298 - DNA, 25 bp, Homo sapien
tccagtatgattggttggtgtcaaa

SEQ ID NO: 6093299 - DNA, 25 bp, Homo sapien
ggtgtcaaatgttgtccagctccaa

SEQ ID NO: 6093300 - DNA, 25 bp, Homo sapien
ggtgagcaattaggaccttcagtcc

SEQ ID NO: 6093301 - DNA, 25 bp, Homo sapien
aggtcactttcgtccttcccgagag

SEQ ID NO: 6093302 - DNA, 25 bp, Homo sapien
acggctgctcgccccaggtgacagt

SEQ ID NO: 6093303 - DNA, 25 bp, Homo sapien
gctgcgggtgtcaccgtcatcccag

SEQ ID NO: 6093304 - DNA, 25 bp, Homo sapien
ctcgtgtcactcattgtgtcagctc

SEQ ID NO: 6093305 - DNA, 25 bp, Homo sapien
tagctgtgctcgctgcgggtgtcac

SEQ ID NO: 6093306 - DNA, 25 bp, Homo sapien
ccagagccacttggtagtccccagg

SEQ ID NO: 6093307 - DNA, 25 bp, Homo sapien
agggtccagccgtgactcccctaag

SEQ ID NO: 6093308 - DNA, 25 bp, Homo sapien
ctggcacctgactcgctgtagctgt

SEQ ID NO: 6093309 - DNA, 25 bp, Homo sapien
tgctcgctgcgggtgtcaccgtcat

SEQ ID NO: 6093310 - DNA, 25 bp, Homo sapien
ctgtagctgtgctcgctgcgggtgt

SEQ ID NO: 6093311 - DNA, 25 bp, Homo sapien
gctcgctgcgggtgtcaccgtcatc

SEQ ID NO: 6093312 - DNA, 25 bp, Homo sapien
agctgtgctcgctgcgggtgtcacc

SEQ ID NO: 6093313 - DNA, 25 bp, Homo sapien
actcgtgtcactcattgtgtcagct

SEQ ID NO: 6093314 - DNA, 25 bp, Homo sapien
ggccggtcagtcattgctggactct

SEQ ID NO: 6093315 - DNA, 25 bp, Homo sapien
tataagtgaaccagaccaccctgat

SEQ ID NO: 6093316 - DNA, 25 bp, Homo sapien
ggcgttctcatccacttggaaacaa

SEQ ID NO: 6093317 - DNA, 25 bp, Homo sapien
cactggcgttctcatccacttggaa

SEQ ID NO: 6093318 - DNA, 25 bp, Homo sapien
ctagaagcatttgggagtagtggcc

SEQ ID NO: 6093319 - DNA, 25 bp, Homo sapien
acacactggcgttctcatccacttg

SEQ ID NO: 6093320 - DNA, 25 bp, Homo sapien
gggccggtcagtcattgctggactc

SEQ ID NO: 6093321 - DNA, 25 bp, Homo sapien
tctcatccacttggaaacaagccag

SEQ ID NO: 6093322 - DNA, 25 bp, Homo sapien
gttgaccaagagcatatttcccctc

SEQ ID NO: 6093323 - DNA, 25 bp, Homo sapien
actagaagcatttgggagtagtggc

SEQ ID NO: 6093324 - DNA, 25 bp, Homo sapien
ctggccacacactggcgttctcatc

SEQ ID NO: 6093325 - DNA, 25 bp, Homo sapien
cctggacgctagccacggagctgct

SEQ ID NO: 6093326 - DNA, 25 bp, Homo sapien
tgaatgacctaaggatgccactggg

SEQ ID NO: 6093327 - DNA, 25 bp, Homo sapien
tgcccattggagtaagcgtcaactg

SEQ ID NO: 6093328 - DNA, 25 bp, Homo sapien
aaaacaatcctgtggccacatacat

SEQ ID NO: 6093329 - DNA, 25 bp, Homo sapien
gagaaggctcacaattacagtaatg

SEQ ID NO: 6093330 - DNA, 25 bp, Homo sapien
cagattaacatcttcaggctgaagg

SEQ ID NO: 6093331 - DNA, 25 bp, Homo sapien
tctgcaggttaccaacagattaaca

SEQ ID NO: 6093332 - DNA, 25 bp, Homo sapien
atgaacttccagtaccgacctccat

SEQ ID NO: 6093333 - DNA, 25 bp, Homo sapien
caaaaggtggtggttcgaatctgtt

SEQ ID NO: 6093334 - DNA, 25 bp, Homo sapien
gtcttcagatttcccgttgggaatg

SEQ ID NO: 6093335 - DNA, 25 bp, Homo sapien
taacttgccgagtctcttctagcat

SEQ ID NO: 6093336 - DNA, 25 bp, Homo sapien
gaaggcccttaatgctgtcttcaga

SEQ ID NO: 6093337 - DNA, 25 bp, Homo sapien
tacagtaatgagtcccgtgacccaa

SEQ ID NO: 6093338 - DNA, 25 bp, Homo sapien
ggaaggtgtcacaggaggatatttc

SEQ ID NO: 6093339 - DNA, 25 bp, Homo sapien
gggaaggtgtcacaggaggatattt

SEQ ID NO: 6093340 - DNA, 25 bp, Homo sapien
ggggaaggtgtcacaggaggatatt

SEQ ID NO: 6093341 - DNA, 25 bp, Homo sapien
gggcgagagacaaagcagtccacga

SEQ ID NO: 6093342 - DNA, 25 bp, Homo sapien
aagacctggtccgtgtaagggtctg

SEQ ID NO: 6093343 - DNA, 25 bp, Homo sapien
ggtgcaccaactccagcaggttaag

SEQ ID NO: 6093344 - DNA, 25 bp, Homo sapien
gctcgctggcacacaaacacgggct

SEQ ID NO: 6093345 - DNA, 25 bp, Homo sapien
ggatgcgcaggcgaccatcttctgc

SEQ ID NO: 6093346 - DNA, 25 bp, Homo sapien
ggcgaccatcttctgccaccgagat

SEQ ID NO: 6093347 - DNA, 25 bp, Homo sapien
gcagagcacactggcgacataggtg

SEQ ID NO: 6093348 - DNA, 25 bp, Homo sapien
tgcccatcagtgctccgcggatgcg

SEQ ID NO: 6093349 - DNA, 25 bp, Homo sapien
ggtccagccgtacaggcgccactgg

SEQ ID NO: 6093350 - DNA, 25 bp, Homo sapien
agacaaagcagtccacgaggtaggg

SEQ ID NO: 6093351 - DNA, 25 bp, Homo sapien
gggctccatggtccagccgtacagg

SEQ ID NO: 6093352 - DNA, 25 bp, Homo sapien
tggcgacataggtgcccatcagtgc

SEQ ID NO: 6093353 - DNA, 25 bp, Homo sapien
gggcgagagacaaagcagtccacga

SEQ ID NO: 6093354 - DNA, 25 bp, Homo sapien
gcagagcacactggcgacataggtg

SEQ ID NO: 6093355 - DNA, 25 bp, Homo sapien
ggcgaccatcttctgccaccgagat

SEQ ID NO: 6093356 - DNA, 25 bp, Homo sapien
ggtgcaccaactccagcaggttaag

SEQ ID NO: 6093357 - DNA, 25 bp, Homo sapien
gctcgctggcacacaaacacgggct

SEQ ID NO: 6093358 - DNA, 25 bp, Homo sapien
agacaaagcagtccacgaggtaggg

SEQ ID NO: 6093359 - DNA, 25 bp, Homo sapien
ggatgcgcaggcgaccatcttctgc

SEQ ID NO: 6093360 - DNA, 25 bp, Homo sapien
tgcccatcagtgctccgcggatgcg

SEQ ID NO: 6093361 - DNA, 25 bp, Homo sapien
aagacctggtccgtgtaagggtctg

SEQ ID NO: 6093362 - DNA, 25 bp, Homo sapien
tggcgacataggtgcccatcagtgc

SEQ ID NO: 6093363 - DNA, 25 bp, Homo sapien
ggtccagccgtacaggcgccactgg

SEQ ID NO: 6093364 - DNA, 25 bp, Homo sapien
gggctccatggtccagccgtacagg

SEQ ID NO: 6093365 - DNA, 25 bp, Homo sapien
taagagctacggcactgtgtcgtca

SEQ ID NO: 6093366 - DNA, 25 bp, Homo sapien
cagaaatatacgatcgattccactg

SEQ ID NO: 6093367 - DNA, 25 bp, Homo sapien
gattccactgtcaaacccaacattg

SEQ ID NO: 6093368 - DNA, 25 bp, Homo sapien
gcgtgtccgtactagtgctttctgg

SEQ ID NO: 6093369 - DNA, 25 bp, Homo sapien
tgctaagtctctggcactacaaagg

SEQ ID NO: 6093370 - DNA, 25 bp, Homo sapien
tatttgatccagagggatatactcc

SEQ ID NO: 6093371 - DNA, 25 bp, Homo sapien
taagggcctgggctctagaggtaca

SEQ ID NO: 6093372 - DNA, 25 bp, Homo sapien
caaagtctgcgttgtcaatgtcctg

SEQ ID NO: 6093373 - DNA, 25 bp, Homo sapien
tacacttgcctggttgtgaaggtct

SEQ ID NO: 6093374 - DNA, 25 bp, Homo sapien
tcatttgctagataagagctacggc

SEQ ID NO: 6093375 - DNA, 25 bp, Homo sapien
tctttgcttgtgagggcaacttcat

SEQ ID NO: 6093376 - DNA, 25 bp, Homo sapien
tatgaccacgatttcaaagtctgcg

SEQ ID NO: 6093377 - DNA, 25 bp, Homo sapien
tcaggacttggtcacgggttatcct

SEQ ID NO: 6093378 - DNA, 25 bp, Homo sapien
ggaagtgccaggtcaatgactgcta

SEQ ID NO: 6093379 - DNA, 25 bp, Homo sapien
ggtcaatgactgctataacttcgca

SEQ ID NO: 6093380 - DNA, 25 bp, Homo sapien
gcttttccggcaagacatactctct

SEQ ID NO: 6093381 - DNA, 25 bp, Homo sapien
cccatagctattcgtcttcagtaag

SEQ ID NO: 6093382 - DNA, 25 bp, Homo sapien
taacttcgcagctattaatgacacc

SEQ ID NO: 6093383 - DNA, 25 bp, Homo sapien
tggagccaagtaattggaaccctaa

SEQ ID NO: 6093384 - DNA, 25 bp, Homo sapien
taacgcagctgttggtgaatcccaa

SEQ ID NO: 6093385 - DNA, 25 bp, Homo sapien
attaatgacacccatccaggccaga

SEQ ID NO: 6093386 - DNA, 25 bp, Homo sapien
gtcacgggttatcctgttcttccca

SEQ ID NO: 6093387 - DNA, 25 bp, Homo sapien
gaaccctaaacacactgcggagctt

SEQ ID NO: 6093388 - DNA, 25 bp, Homo sapien
aatacagaaacggattaacgcagct

SEQ ID NO: 6093389 - DNA, 25 bp, Homo sapien
tctcccatttcttccataagaaagg

SEQ ID NO: 6093390 - DNA, 25 bp, Homo sapien
gggttagaacaaggccgtgcacact

SEQ ID NO: 6093391 - DNA, 25 bp, Homo sapien
aggcaaaactgtggagtcctagagg

SEQ ID NO: 6093392 - DNA, 25 bp, Homo sapien
taaatagtctctgagactgcatgtg

SEQ ID NO: 6093393 - DNA, 25 bp, Homo sapien
tctctcactctaatgtaacatatcc

SEQ ID NO: 6093394 - DNA, 25 bp, Homo sapien
agagaaactactagactctgctgaa

SEQ ID NO: 6093395 - DNA, 25 bp, Homo sapien
ctgggctaggagttaagagtactgt

SEQ ID NO: 6093396 - DNA, 25 bp, Homo sapien
ttccataagaaaggctccttattct

SEQ ID NO: 6093397 - DNA, 25 bp, Homo sapien
agttaagagtactgtctaaccagtc

SEQ ID NO: 6093398 - DNA, 25 bp, Homo sapien
ccttacagagaaactactagactct

SEQ ID NO: 6093399 - DNA, 25 bp, Homo sapien
aaggccgtgcacactgcagacagaa

SEQ ID NO: 6093400 - DNA, 25 bp, Homo sapien
gggcaatctcacagcaatataagga

SEQ ID NO: 6093401 - DNA, 25 bp, Homo sapien
atcacatttaggagatacttaagtc

SEQ ID NO: 6093402 - DNA, 25 bp, Homo sapien
ccaagcacaaactaaaaatgacctg

SEQ ID NO: 6093403 - DNA, 25 bp, Homo sapien
tccaagcacaaactaaaaatgacct

SEQ ID NO: 6093404 - DNA, 25 bp, Homo sapien
ttccaagcacaaactaaaaatgacc

SEQ ID NO: 6093405 - DNA, 25 bp, Homo sapien
catttaggagatacttaagtcatat

SEQ ID NO: 6093406 - DNA, 25 bp, Homo sapien
tcacatttaggagatacttaagtca

SEQ ID NO: 6093407 - DNA, 25 bp, Homo sapien
tatcacatttaggagatacttaagt

SEQ ID NO: 6093408 - DNA, 25 bp, Homo sapien
cacatttaggagatacttaagtcat

SEQ ID NO: 6093409 - DNA, 25 bp, Homo sapien
tttaggagatacttaagtcatattc

SEQ ID NO: 6093410 - DNA, 25 bp, Homo sapien
agcacaaactaaaaatgacctgtgt

SEQ ID NO: 6093411 - DNA, 25 bp, Homo sapien
aagcacaaactaaaaatgacctgtg

SEQ ID NO: 6093412 - DNA, 25 bp, Homo sapien
caagcacaaactaaaaatgacctgt

SEQ ID NO: 6093413 - DNA, 25 bp, Homo sapien
aataacatctacaatcgcgaccaat

SEQ ID NO: 6093414 - DNA, 25 bp, Homo sapien
taacatctacaatcgcgaccaattt

SEQ ID NO: 6093415 - DNA, 25 bp, Homo sapien
ataacatctacaatcgcgaccaatt

SEQ ID NO: 6093416 - DNA, 25 bp, Homo sapien
caataacatctacaatcgcgaccaa

SEQ ID NO: 6093417 - DNA, 25 bp, Homo sapien
agcagcagcagtacccttagtacca

SEQ ID NO: 6093418 - DNA, 25 bp, Homo sapien
aacatctacaatcgcgaccaatttt

SEQ ID NO: 6093419 - DNA, 25 bp, Homo sapien
caatatacacagataacagaacttc

SEQ ID NO: 6093420 - DNA, 25 bp, Homo sapien
tgcctgtggatgcatatatgatcta

SEQ ID NO: 6093421 - DNA, 25 bp, Homo sapien
tcatccccaaatggtaatcagtact

SEQ ID NO: 6093422 - DNA, 25 bp, Homo sapien
ggagggtcccacagataattgcaat

SEQ ID NO: 6093423 - DNA, 25 bp, Homo sapien
ggtaatcagtactccagcacattat

SEQ ID NO: 6093424 - DNA, 25 bp, Homo sapien
tgcaggtgagcaattactattcaag

SEQ ID NO: 6093425 - DNA, 25 bp, Homo sapien
gatggagtttgaacatcttgctgct

SEQ ID NO: 6093426 - DNA, 25 bp, Homo sapien
tatatgatctatcccacactctgtt

SEQ ID NO: 6093427 - DNA, 25 bp, Homo sapien
gatgcccctcttgttacaaaatgca

SEQ ID NO: 6093428 - DNA, 25 bp, Homo sapien
atggttatatggacacagtgcctgt

SEQ ID NO: 6093429 - DNA, 25 bp, Homo sapien
ggtaactcatgaggtcgacgctgaa

SEQ ID NO: 6093430 - DNA, 25 bp, Homo sapien
tgggaaggcatcacccaaggttgac

SEQ ID NO: 6093431 - DNA, 25 bp, Homo sapien
ggcctcccgaaagtggattattgct

SEQ ID NO: 6093432 - DNA, 25 bp, Homo sapien
gtgtcactgggtcttcaagacaaac

SEQ ID NO: 6093433 - DNA, 25 bp, Homo sapien
cactcccttccatgtcgtccacatc

SEQ ID NO: 6093434 - DNA, 25 bp, Homo sapien
aggctaagtaacattcgataagacc

SEQ ID NO: 6093435 - DNA, 25 bp, Homo sapien
attcgataagaccttcataacaatc

SEQ ID NO: 6093436 - DNA, 25 bp, Homo sapien
actgtcgctgccctccaggtcccct

SEQ ID NO: 6093437 - DNA, 25 bp, Homo sapien
acagtcactctgattagccagtgcg

SEQ ID NO: 6093438 - DNA, 25 bp, Homo sapien
cttccatgtcgtccacatcctcctc

SEQ ID NO: 6093439 - DNA, 25 bp, Homo sapien
ggtctgtgcatttgctcccagagtt

SEQ ID NO: 6093440 - DNA, 25 bp, Homo sapien
taagaccttcataacaatctaagcg

SEQ ID NO: 6093441 - DNA, 25 bp, Homo sapien
gacaaggtgcgagccgtatggcctc

SEQ ID NO: 6093442 - DNA, 25 bp, Homo sapien
tgctatactatactggtccattgcc

SEQ ID NO: 6093443 - DNA, 25 bp, Homo sapien
gactctcctccttctccatcttctg

SEQ ID NO: 6093444 - DNA, 25 bp, Homo sapien
cctccttctccatcttctgcatccc

SEQ ID NO: 6093445 - DNA, 25 bp, Homo sapien
ccttaatgtaatctggcctttgggt

SEQ ID NO: 6093446 - DNA, 25 bp, Homo sapien
ggtaagggtctgtgcatttgctccc

SEQ ID NO: 6093447 - DNA, 25 bp, Homo sapien
ctaaaagggtaagggtctgtgcatt

SEQ ID NO: 6093448 - DNA, 25 bp, Homo sapien
tgctcccagagttttgtaaacgttg

SEQ ID NO: 6093449 - DNA, 25 bp, Homo sapien
ccgatgcaggacacagtcactctga

SEQ ID NO: 6093450 - DNA, 25 bp, Homo sapien
tcagggctttatctaataatgtttt

SEQ ID NO: 6093451 - DNA, 25 bp, Homo sapien
ctaataatgttttggctttctcctg

SEQ ID NO: 6093452 - DNA, 25 bp, Homo sapien
tggcatccgtgggactctcctcctt

SEQ ID NO: 6093453 - DNA, 25 bp, Homo sapien
attagccagtgcgttcctcagcaaa

SEQ ID NO: 6093454 - DNA, 25 bp, Homo sapien
cctgagtggcatccgtgggactctc

SEQ ID NO: 6093455 - DNA, 25 bp, Homo sapien
tgcatttgctcccagagttttgtaa

SEQ ID NO: 6093456 - DNA, 25 bp, Homo sapien
gctaagtagttctgcttttttcacc

SEQ ID NO: 6093457 - DNA, 25 bp, Homo sapien
cagcaaagcaattccatcttcatat

SEQ ID NO: 6093458 - DNA, 25 bp, Homo sapien
ttcatatttctgttctctgctaagt

SEQ ID NO: 6093459 - DNA, 25 bp, Homo sapien
tctccatcttctgcatcccctctag

SEQ ID NO: 6093460 - DNA, 25 bp, Homo sapien
actatactggtccattgcctcctga

SEQ ID NO: 6093461 - DNA, 25 bp, Homo sapien
tgggccgcctcactgtcgctgccct

SEQ ID NO: 6093462 - DNA, 25 bp, Homo sapien
attggggtccaaacttagtgctata

SEQ ID NO: 6093463 - DNA, 25 bp, Homo sapien
acttagtgctatactatactggtcc

SEQ ID NO: 6093464 - DNA, 25 bp, Homo sapien
tctcctgtgtcactgggtcttcaag

SEQ ID NO: 6093465 - DNA, 25 bp, Homo sapien
caggacacagtcactctgattagcc

SEQ ID NO: 6093466 - DNA, 25 bp, Homo sapien
agacttctggtcattggggtccaaa

SEQ ID NO: 6093467 - DNA, 25 bp, Homo sapien
ccactgggccgcctcactgtcgctg

SEQ ID NO: 6093468 - DNA, 25 bp, Homo sapien
tttctgttctctgctaagtagttct

SEQ ID NO: 6093469 - DNA, 25 bp, Homo sapien
tgttggaggctaagtaacattcgat

SEQ ID NO: 6093470 - DNA, 25 bp, Homo sapien
actctgattagccagtgcgttcctc

SEQ ID NO: 6093471 - DNA, 25 bp, Homo sapien
ctgggtcttcaagacaaacggtggc

SEQ ID NO: 6093472 - DNA, 25 bp, Homo sapien
gttcctcagcaaagcaattccatct

SEQ ID NO: 6093473 - DNA, 25 bp, Homo sapien
ccacatcctcctcctgagtggcatc

SEQ ID NO: 6093474 - DNA, 25 bp, Homo sapien
cattgcctcctgatactcattgaca

SEQ ID NO: 6093475 - DNA, 25 bp, Homo sapien
cctctagagacttctggtcattggg

SEQ ID NO: 6093476 - DNA, 25 bp, Homo sapien
tttcaccacagccttaatgtaatct

SEQ ID NO: 6093477 - DNA, 25 bp, Homo sapien
cttcaagacaaacggtggctaaaag

SEQ ID NO: 6093478 - DNA, 25 bp, Homo sapien
tagttctgcttttttcaccacagcc

SEQ ID NO: 6093479 - DNA, 25 bp, Homo sapien
ccacagccttaatgtaatctggcct

SEQ ID NO: 6093480 - DNA, 25 bp, Homo sapien
ctttatctaataatgttttggcttt

SEQ ID NO: 6093481 - DNA, 25 bp, Homo sapien
ttctctgctaagtagttctgctttt

SEQ ID NO: 6093482 - DNA, 25 bp, Homo sapien
tgtcgtccacatcctcctcctgagt

SEQ ID NO: 6093483 - DNA, 25 bp, Homo sapien
cagtgcgttcctcagcaaagcaatt

SEQ ID NO: 6093484 - DNA, 25 bp, Homo sapien
tttgggtcagggctttatctaataa

SEQ ID NO: 6093485 - DNA, 25 bp, Homo sapien
ctggtcattggggtccaaacttagt

SEQ ID NO: 6093486 - DNA, 25 bp, Homo sapien
taggatccgatgcaggacacagtca

SEQ ID NO: 6093487 - DNA, 25 bp, Homo sapien
agctacaaggaaatctcctaggatc

SEQ ID NO: 6093488 - DNA, 25 bp, Homo sapien
gtgcgagccgtatggcctcccgaaa

SEQ ID NO: 6093489 - DNA, 25 bp, Homo sapien
atctcctaggatccgatgcaggaca

SEQ ID NO: 6093490 - DNA, 25 bp, Homo sapien
tggctttctcctgtgtcactgggtc

SEQ ID NO: 6093491 - DNA, 25 bp, Homo sapien
gtccaaacttagtgctatactatac

SEQ ID NO: 6093492 - DNA, 25 bp, Homo sapien
atactcattgacagctacaaggaaa

SEQ ID NO: 6093493 - DNA, 25 bp, Homo sapien
ccattaccattgcttctcgaatact

SEQ ID NO: 6093494 - DNA, 25 bp, Homo sapien
ccgtgggactctcctccttctccat

SEQ ID NO: 6093495 - DNA, 25 bp, Homo sapien
tcttctgcatcccctctagagactt

SEQ ID NO: 6093496 - DNA, 25 bp, Homo sapien
atgttttggctttctcctgtgtcac

SEQ ID NO: 6093497 - DNA, 25 bp, Homo sapien
gctgccctccaggtccccttcttcc

SEQ ID NO: 6093498 - DNA, 25 bp, Homo sapien
gccgtatggcctcccgaaagtggat

SEQ ID NO: 6093499 - DNA, 25 bp, Homo sapien
tgcttttttcaccacagccttaatg

SEQ ID NO: 6093500 - DNA, 25 bp, Homo sapien
attgacagctacaaggaaatctcct

SEQ ID NO: 6093501 - DNA, 25 bp, Homo sapien
ctggtccattgcctcctgatactca

SEQ ID NO: 6093502 - DNA, 25 bp, Homo sapien
ctcctgatactcattgacagctaca

SEQ ID NO: 6093503 - DNA, 25 bp, Homo sapien
ccattgcttctcgaatactgttgga

SEQ ID NO: 6093504 - DNA, 25 bp, Homo sapien
gcatcccctctagagacttctggtc

SEQ ID NO: 6093505 - DNA, 25 bp, Homo sapien
gaatactgttggaggctaagtaaca

SEQ ID NO: 6093506 - DNA, 25 bp, Homo sapien
agtaacattcgataagaccttcata

SEQ ID NO: 6093507 - DNA, 25 bp, Homo sapien
gcctcactgtcgctgccctccaggt

SEQ ID NO: 6093508 - DNA, 25 bp, Homo sapien
ctaagcgacaaggtgcgagccgtat

SEQ ID NO: 6093509 - DNA, 25 bp, Homo sapien
tccatcttcatatttctgttctctg

SEQ ID NO: 6093510 - DNA, 25 bp, Homo sapien
taaacgttgttagccattaccattg

SEQ ID NO: 6093511 - DNA, 25 bp, Homo sapien
cttcataacaatctaagcgacaagg

SEQ ID NO: 6093512 - DNA, 25 bp, Homo sapien
aaggaaatctcctaggatccgatgc

SEQ ID NO: 6093513 - DNA, 25 bp, Homo sapien
aacaatctaagcgacaaggtgcgag

SEQ ID NO: 6093514 - DNA, 25 bp, Homo sapien
cttccccactcccttccatgtcgtc

SEQ ID NO: 6093515 - DNA, 25 bp, Homo sapien
ctggcctttgggtcagggctttatc

SEQ ID NO: 6093516 - DNA, 25 bp, Homo sapien
cttctcgaatactgttggaggctaa

SEQ ID NO: 6093517 - DNA, 25 bp, Homo sapien
cccttcttccccactcccttccatg

SEQ ID NO: 6093518 - DNA, 25 bp, Homo sapien
tgttagccattaccattgcttctcg

SEQ ID NO: 6093519 - DNA, 25 bp, Homo sapien
agcaattccatcttcatatttctgt

SEQ ID NO: 6093520 - DNA, 25 bp, Homo sapien
tgtaatctggcctttgggtcagggc

SEQ ID NO: 6093521 - DNA, 25 bp, Homo sapien
cctcctcctgagtggcatccgtggg

SEQ ID NO: 6093522 - DNA, 25 bp, Homo sapien
cttagagaaggccagcacgtgaaga

SEQ ID NO: 6093523 - DNA, 25 bp, Homo sapien
tcctggtgacaattgtcttgatgag

SEQ ID NO: 6093524 - DNA, 25 bp, Homo sapien
gacatagaaaagatagggccaaagc

SEQ ID NO: 6093525 - DNA, 25 bp, Homo sapien
aaagccacaagaatccgcacagggt

SEQ ID NO: 6093526 - DNA, 25 bp, Homo sapien
ctggaaggcatactggtgaggatct

SEQ ID NO: 6093527 - DNA, 25 bp, Homo sapien
cacctctgtggagtagcctgaagct

SEQ ID NO: 6093528 - DNA, 25 bp, Homo sapien
aagatcccggaggttctccaggtcg

SEQ ID NO: 6093529 - DNA, 25 bp, Homo sapien
tggtccatcttggataaggtcagga

SEQ ID NO: 6093530 - DNA, 25 bp, Homo sapien
ccagcacgtgaagaagatcccggag

SEQ ID NO: 6093531 - DNA, 25 bp, Homo sapien
gactttttggatgggcacagcttgg

SEQ ID NO: 6093532 - DNA, 25 bp, Homo sapien
ggatcacgtttctggaaggcatact

SEQ ID NO: 6093533 - DNA, 25 bp, Homo sapien
gaaatgtcattgatcctggtgacaa

SEQ ID NO: 6093534 - DNA, 25 bp, Homo sapien
ttcatatcgcactgcaggcacagcg

SEQ ID NO: 6093535 - DNA, 25 bp, Homo sapien
tgtttatgaacgtgcaaagaaagaa

SEQ ID NO: 6093536 - DNA, 25 bp, Homo sapien
ctctctagtgctcctggctcgggct

SEQ ID NO: 6093537 - DNA, 25 bp, Homo sapien
tcgttcatatcgcactgcaggcaca

SEQ ID NO: 6093538 - DNA, 25 bp, Homo sapien
tctcttggaatgacgaatgaaaacg

SEQ ID NO: 6093539 - DNA, 25 bp, Homo sapien
ctctctctcttggaatgacgaatga

SEQ ID NO: 6093540 - DNA, 25 bp, Homo sapien
gctgtcgccctgcttgttcaccgcg

SEQ ID NO: 6093541 - DNA, 25 bp, Homo sapien
caggcggctatagcagtcgttcata

SEQ ID NO: 6093542 - DNA, 25 bp, Homo sapien
tcagcggcacagaatgctgtcgccc

SEQ ID NO: 6093543 - DNA, 25 bp, Homo sapien
ggctatagcagtcgttcatatcgca

SEQ ID NO: 6093544 - DNA, 25 bp, Homo sapien
tggaatgacgaatgaaaacgtttct

SEQ ID NO: 6093545 - DNA, 25 bp, Homo sapien
ttatgaacgtgcaaagaaagaatga

SEQ ID NO: 6093546 - DNA, 25 bp, Homo sapien
gcgggatggtgggcaaccacctcag

SEQ ID NO: 6093547 - DNA, 25 bp, Homo sapien
cgggatggtgggcaaccacctcagg

SEQ ID NO: 6093548 - DNA, 25 bp, Homo sapien
gcaaccacctcaggcggctatagca

SEQ ID NO: 6093549 - DNA, 25 bp, Homo sapien
accagcgcgataaccacaggcaaaa

SEQ ID NO: 6093550 - DNA, 25 bp, Homo sapien
gggaacctggtagcgttgaattagc

SEQ ID NO: 6093551 - DNA, 25 bp, Homo sapien
gtgaattaattgttgtcaccaaaga

SEQ ID NO: 6093552 - DNA, 25 bp, Homo sapien
tggcactgttattttcatagtggaa

SEQ ID NO: 6093553 - DNA, 25 bp, Homo sapien
ccgttttctggagtgcctgggtctc

SEQ ID NO: 6093554 - DNA, 25 bp, Homo sapien
tgttattttcatagtggaactttca

SEQ ID NO: 6093555 - DNA, 25 bp, Homo sapien
ggctgatcatttccgttttctggag

SEQ ID NO: 6093556 - DNA, 25 bp, Homo sapien
taggagggggtggttgatggagtgg

SEQ ID NO: 6093557 - DNA, 25 bp, Homo sapien
taattgttgtcaccaaagatgtttg

SEQ ID NO: 6093558 - DNA, 25 bp, Homo sapien
tcggcaaggcatccagtagttgagt

SEQ ID NO: 6093559 - DNA, 25 bp, Homo sapien
agtatcttgaagcagtgacatggtg

SEQ ID NO: 6093560 - DNA, 25 bp, Homo sapien
tgttcgccagactcatgagagattg

SEQ ID NO: 6093561 - DNA, 25 bp, Homo sapien
tcttccagcatattcgatacaaacc

SEQ ID NO: 6093562 - DNA, 25 bp, Homo sapien
catttgaagttggagtatttggcac

SEQ ID NO: 6093563 - DNA, 25 bp, Homo sapien
tagtaactgatatttccgttgttct

SEQ ID NO: 6093564 - DNA, 25 bp, Homo sapien
ttatcggactgaggctgatcatttc

SEQ ID NO: 6093565 - DNA, 25 bp, Homo sapien
tgcctgggtctctcttccagcatat

SEQ ID NO: 6093566 - DNA, 25 bp, Homo sapien
ggtctctcttccagcatattcgata

SEQ ID NO: 6093567 - DNA, 25 bp, Homo sapien
accttcagttgttgttcccacttca

SEQ ID NO: 6093568 - DNA, 25 bp, Homo sapien
aattagcatttgaagttggagtatt

SEQ ID NO: 6093569 - DNA, 25 bp, Homo sapien
aggcatccagtagttgagtagtaac

SEQ ID NO: 6093570 - DNA, 25 bp, Homo sapien
ttgaagcagtgacatggtgtgtgca

SEQ ID NO: 6093571 - DNA, 25 bp, Homo sapien
tgggatacgtcacttttggtcgttc

SEQ ID NO: 6093572 - DNA, 25 bp, Homo sapien
tgttcccacttcatgttttggtgtt

SEQ ID NO: 6093573 - DNA, 25 bp, Homo sapien
ctttcattccttaggggaccttcag

SEQ ID NO: 6093574 - DNA, 25 bp, Homo sapien
ctgatatttccgttgttctgattga

SEQ ID NO: 6093575 - DNA, 25 bp, Homo sapien
ttggtgttgtcagtgaattaattgt

SEQ ID NO: 6093576 - DNA, 25 bp, Homo sapien
tttccgttgttctgattgaactctg

SEQ ID NO: 6093577 - DNA, 25 bp, Homo sapien
caaacccaccagagtaaataccaag

SEQ ID NO: 6093578 - DNA, 25 bp, Homo sapien
gcatattcgatacaaacccaccaga

SEQ ID NO: 6093579 - DNA, 25 bp, Homo sapien
accaagagtgttataacaaccagcg

SEQ ID NO: 6093580 - DNA, 25 bp, Homo sapien
gtcttaacagtgagcagcttcacac

SEQ ID NO: 6093581 - DNA, 25 bp, Homo sapien
cagtcttgttctgggaacctggtag

SEQ ID NO: 6093582 - DNA, 25 bp, Homo sapien
ttgtcagtgaattaattgttgtcac

SEQ ID NO: 6093583 - DNA, 25 bp, Homo sapien
tgcagtgattttcggcaaggcatcc

SEQ ID NO: 6093584 - DNA, 25 bp, Homo sapien
gcaaaatgatactggaataggaggg

SEQ ID NO: 6093585 - DNA, 25 bp, Homo sapien
agttgttgttcccacttcatgtttt

SEQ ID NO: 6093586 - DNA, 25 bp, Homo sapien
gactgaggctgatcatttccgtttt

SEQ ID NO: 6093587 - DNA, 25 bp, Homo sapien
gtaaataccaagagtgttataacaa

SEQ ID NO: 6093588 - DNA, 25 bp, Homo sapien
ttgtcaccaaagatgtttgggatac

SEQ ID NO: 6093589 - DNA, 25 bp, Homo sapien
agtgttataacaaccagcgcgataa

SEQ ID NO: 6093590 - DNA, 25 bp, Homo sapien
agtggttgcaatcttcctatcctca

SEQ ID NO: 6093591 - DNA, 25 bp, Homo sapien
agcagcttcacactctctttatcgg

SEQ ID NO: 6093592 - DNA, 25 bp, Homo sapien
tgattttcggcaaggcatccagtag

SEQ ID NO: 6093593 - DNA, 25 bp, Homo sapien
agttggagtatttggcactgttatt

SEQ ID NO: 6093594 - DNA, 25 bp, Homo sapien
ttagagatgcagaggatgttgcagt

SEQ ID NO: 6093595 - DNA, 25 bp, Homo sapien
gcgttgaattagcatttgaagttgg

SEQ ID NO: 6093596 - DNA, 25 bp, Homo sapien
ccaaagatgtttgggatacgtcact

SEQ ID NO: 6093597 - DNA, 25 bp, Homo sapien
ccagtagttgagtagtaactgatat

SEQ ID NO: 6093598 - DNA, 25 bp, Homo sapien
tgattgaactctgattctcagtctt

SEQ ID NO: 6093599 - DNA, 25 bp, Homo sapien
cacttcatgttttggtgttgtcagt

SEQ ID NO: 6093600 - DNA, 25 bp, Homo sapien
ggatgttgcagtgattttcggcaag

SEQ ID NO: 6093601 - DNA, 25 bp, Homo sapien
tccttcgggaggtgttccatctgct

SEQ ID NO: 6093602 - DNA, 25 bp, Homo sapien
tgttctgggaacctggtagcgttga

SEQ ID NO: 6093603 - DNA, 25 bp, Homo sapien
cctgtgcagagtgttcgccagactc

SEQ ID NO: 6093604 - DNA, 25 bp, Homo sapien
ataacaaccagcgcgataaccacag

SEQ ID NO: 6093605 - DNA, 25 bp, Homo sapien
tgtgtgcagttgttagagatgcaga

SEQ ID NO: 6093606 - DNA, 25 bp, Homo sapien
tgatggagtggttgcaatcttccta

SEQ ID NO: 6093607 - DNA, 25 bp, Homo sapien
ttgttctgattgaactctgattctc

SEQ ID NO: 6093608 - DNA, 25 bp, Homo sapien
tgcagaggatgttgcagtgattttc

SEQ ID NO: 6093609 - DNA, 25 bp, Homo sapien
cagttgttagagatgcagaggatgt

SEQ ID NO: 6093610 - DNA, 25 bp, Homo sapien
atcctcagtatcttgaagcagtgac

SEQ ID NO: 6093611 - DNA, 25 bp, Homo sapien
ccacaggcaaaatgatactggaata

SEQ ID NO: 6093612 - DNA, 25 bp, Homo sapien
gattctcagtcttgttctgggaacc

SEQ ID NO: 6093613 - DNA, 25 bp, Homo sapien
ctggtagcgttgaattagcatttga

SEQ ID NO: 6093614 - DNA, 25 bp, Homo sapien
ctctctttatcggactgaggctgat

SEQ ID NO: 6093615 - DNA, 25 bp, Homo sapien
tcgatacaaacccaccagagtaaat

SEQ ID NO: 6093616 - DNA, 25 bp, Homo sapien
actggaataggagggggtggttgat

SEQ ID NO: 6093617 - DNA, 25 bp, Homo sapien
gatgtttgggatacgtcacttttgg

SEQ ID NO: 6093618 - DNA, 25 bp, Homo sapien
cagtgacatggtgtgtgcagttgtt

SEQ ID NO: 6093619 - DNA, 25 bp, Homo sapien
agtatttggcactgttattttcata

SEQ ID NO: 6093620 - DNA, 25 bp, Homo sapien
cttcctatcctcagtatcttgaagc

SEQ ID NO: 6093621 - DNA, 25 bp, Homo sapien
gagattgtcttaacagtgagcagct

SEQ ID NO: 6093622 - DNA, 25 bp, Homo sapien
aactctgattctcagtcttgttctg

SEQ ID NO: 6093623 - DNA, 25 bp, Homo sapien
acatggtgtgtgcagttgttagaga

SEQ ID NO: 6093624 - DNA, 25 bp, Homo sapien
gttgagtagtaactgatatttccgt

SEQ ID NO: 6093625 - DNA, 25 bp, Homo sapien
ggtggttgatggagtggttgcaatc

SEQ ID NO: 6093626 - DNA, 25 bp, Homo sapien
cagagtgttcgccagactcatgaga

SEQ ID NO: 6093627 - DNA, 25 bp, Homo sapien
tgcaatcttcctatcctcagtatct

SEQ ID NO: 6093628 - DNA, 25 bp, Homo sapien
cattccttaggggaccttcagttgt

SEQ ID NO: 6093629 - DNA, 25 bp, Homo sapien
ccagactcatgagagattgtcttaa

SEQ ID NO: 6093630 - DNA, 25 bp, Homo sapien
tcgttccttcgggaggtgttccatc

SEQ ID NO: 6093631 - DNA, 25 bp, Homo sapien
gcgataaccacaggcaaaatgatac

SEQ ID NO: 6093632 - DNA, 25 bp, Homo sapien
tcatttccgttttctggagtgcctg

SEQ ID NO: 6093633 - DNA, 25 bp, Homo sapien
accagagtaaataccaagagtgtta

SEQ ID NO: 6093634 - DNA, 25 bp, Homo sapien
acagtgagcagcttcacactctctt

SEQ ID NO: 6093635 - DNA, 25 bp, Homo sapien
ttcacactctctttatcggactgag

SEQ ID NO: 6093636 - DNA, 25 bp, Homo sapien
tcatgagagattgtcttaacagtga

SEQ ID NO: 6093637 - DNA, 25 bp, Homo sapien
tctggagtgcctgggtctctcttcc

SEQ ID NO: 6093638 - DNA, 25 bp, Homo sapien
gctgcggttccgcgggctcagcact

SEQ ID NO: 6093639 - DNA, 25 bp, Homo sapien
gagcgcagctgacgtttcagaagca

SEQ ID NO: 6093640 - DNA, 25 bp, Homo sapien
gctgacgtttcagaagcactcgcgt

SEQ ID NO: 6093641 - DNA, 25 bp, Homo sapien
ttccgcgggctcagcactcctaggg

SEQ ID NO: 6093642 - DNA, 25 bp, Homo sapien
gcagctgacgtttcagaagcactcg

SEQ ID NO: 6093643 - DNA, 25 bp, Homo sapien
tttcagaagcactcgcgtgcaccgg

SEQ ID NO: 6093644 - DNA, 25 bp, Homo sapien
tgacgtttcagaagcactcgcgtgc

SEQ ID NO: 6093645 - DNA, 25 bp, Homo sapien
ggagcgcagctgacgtttcagaagc

SEQ ID NO: 6093646 - DNA, 25 bp, Homo sapien
cactcctaggggagcgcagctgacg

SEQ ID NO: 6093647 - DNA, 25 bp, Homo sapien
gacgtttcagaagcactcgcgtgca

SEQ ID NO: 6093648 - DNA, 25 bp, Homo sapien
agaagcactcgcgtgcaccggaaaa

SEQ ID NO: 6093649 - DNA, 25 bp, Homo sapien
ggttccgcgggctcagcactcctag

SEQ ID NO: 6093650 - DNA, 25 bp, Homo sapien
tcccatagagcctggccaaatcaca

SEQ ID NO: 6093651 - DNA, 25 bp, Homo sapien
ccagttcggtctttcaaatcgggat

SEQ ID NO: 6093652 - DNA, 25 bp, Homo sapien
tggccgcatcatgaatgacagcgaa

SEQ ID NO: 6093653 - DNA, 25 bp, Homo sapien
tgaatgacagcgaaaccagttcggt

SEQ ID NO: 6093654 - DNA, 25 bp, Homo sapien
tatcctcgatgttaacatcagcttg

SEQ ID NO: 6093655 - DNA, 25 bp, Homo sapien
aatctcgggatttccaagtttcata

SEQ ID NO: 6093656 - DNA, 25 bp, Homo sapien
tcgggattagcacctctaagtagca

SEQ ID NO: 6093657 - DNA, 25 bp, Homo sapien
acattgctggccgtgtgcttcacca

SEQ ID NO: 6093658 - DNA, 25 bp, Homo sapien
gcagtctcctggcaatctcgggatt

SEQ ID NO: 6093659 - DNA, 25 bp, Homo sapien
gcctgcatcaggctaacaacctcat

SEQ ID NO: 6093660 - DNA, 25 bp, Homo sapien
caaactagtaagttgctctaggtcc

SEQ ID NO: 6093661 - DNA, 25 bp, Homo sapien
tggccaaatcacaggcggtgtcccc

SEQ ID NO: 6093662 - DNA, 25 bp, Homo sapien
gcttttgtcaggagcctcagcccta

SEQ ID NO: 6093663 - DNA, 25 bp, Homo sapien
tgtgtggcatgagcttagggtctgg

SEQ ID NO: 6093664 - DNA, 25 bp, Homo sapien
gagcttttgtcaggagcctcagccc

SEQ ID NO: 6093665 - DNA, 25 bp, Homo sapien
tggcctctggtacctttgagctgtg

SEQ ID NO: 6093666 - DNA, 25 bp, Homo sapien
cccttcagccttgcggtagtccttc

SEQ ID NO: 6093667 - DNA, 25 bp, Homo sapien
gggtgggatgtcagccagccatgag

SEQ ID NO: 6093668 - DNA, 25 bp, Homo sapien
tctggtacctttgagctgtgtgagc

SEQ ID NO: 6093669 - DNA, 25 bp, Homo sapien
ccatgagggagtagtgggttcattc

SEQ ID NO: 6093670 - DNA, 25 bp, Homo sapien
tctctcatcaggatagggtgtgggc

SEQ ID NO: 6093671 - DNA, 25 bp, Homo sapien
tttgctggcctctggtacctttgag

SEQ ID NO: 6093672 - DNA, 25 bp, Homo sapien
tctgctccggctcagtctgctcagg

SEQ ID NO: 6093673 - DNA, 25 bp, Homo sapien
gggttcattcttcatgtgtggcatg

SEQ ID NO: 6093674 - DNA, 25 bp, Homo sapien
catactcgactgtgcgcccaagaga

SEQ ID NO: 6093675 - DNA, 25 bp, Homo sapien
cactgtcatactcgactgtgcgccc

SEQ ID NO: 6093676 - DNA, 25 bp, Homo sapien
tcgactgtgcgcccaagagaagggt

SEQ ID NO: 6093677 - DNA, 25 bp, Homo sapien
gtcatactcgactgtgcgcccaaga

SEQ ID NO: 6093678 - DNA, 25 bp, Homo sapien
atactcgactgtgcgcccaagagaa

SEQ ID NO: 6093679 - DNA, 25 bp, Homo sapien
tcatactcgactgtgcgcccaagag

SEQ ID NO: 6093680 - DNA, 25 bp, Homo sapien
actgtcatactcgactgtgcgccca

SEQ ID NO: 6093681 - DNA, 25 bp, Homo sapien
ctgtcatactcgactgtgcgcccaa

SEQ ID NO: 6093682 - DNA, 25 bp, Homo sapien
ctcgactgtgcgcccaagagaaggg

SEQ ID NO: 6093683 - DNA, 25 bp, Homo sapien
actcgactgtgcgcccaagagaagg

SEQ ID NO: 6093684 - DNA, 25 bp, Homo sapien
cgactgtgcgcccaagagaagggtg

SEQ ID NO: 6093685 - DNA, 25 bp, Homo sapien
tgtcatactcgactgtgcgcccaag

SEQ ID NO: 6093686 - DNA, 25 bp, Homo sapien
gaaacaagcatagaaatattttggc

SEQ ID NO: 6093687 - DNA, 25 bp, Homo sapien
tctcagccaaaaagaaggtaccagt

SEQ ID NO: 6093688 - DNA, 25 bp, Homo sapien
gattgtccacctacactttactgag

SEQ ID NO: 6093689 - DNA, 25 bp, Homo sapien
catatcacaggaagattgtccacct

SEQ ID NO: 6093690 - DNA, 25 bp, Homo sapien
tggcacatgatttattacgaacagg

SEQ ID NO: 6093691 - DNA, 25 bp, Homo sapien
caatgggatgttaaaagcagtggct

SEQ ID NO: 6093692 - DNA, 25 bp, Homo sapien
caatgggatgttaacaccatttatg

SEQ ID NO: 6093693 - DNA, 25 bp, Homo sapien
tctagctacatgaccaatgtcacta

SEQ ID NO: 6093694 - DNA, 25 bp, Homo sapien
ttttatgtgtaagacaagatgtggc

SEQ ID NO: 6093695 - DNA, 25 bp, Homo sapien
cattgaagtaggaaattaattggct

SEQ ID NO: 6093696 - DNA, 25 bp, Homo sapien
ctgagacaaagacaatggccattta

SEQ ID NO: 6093697 - DNA, 25 bp, Homo sapien
gaccaatgtcactacatatcacagg

SEQ ID NO: 6093698 - DNA, 25 bp, Homo sapien
actcccggcctagtgctttagcctg

SEQ ID NO: 6093699 - DNA, 25 bp, Homo sapien
ccagcgatcaaaggcgtccatgatc

SEQ ID NO: 6093700 - DNA, 25 bp, Homo sapien
gtacagggacactaccttgccccat

SEQ ID NO: 6093701 - DNA, 25 bp, Homo sapien
tgtgggccagcgatcaaaggcgtcc

SEQ ID NO: 6093702 - DNA, 25 bp, Homo sapien
gatgtggccggccacagcgaggaag

SEQ ID NO: 6093703 - DNA, 25 bp, Homo sapien
acgcctccgaagccaggtagccaag

SEQ ID NO: 6093704 - DNA, 25 bp, Homo sapien
ccgctagtcccgcagccgccgagta

SEQ ID NO: 6093705 - DNA, 25 bp, Homo sapien
ccaggcagtcaaccagggcatgaac

SEQ ID NO: 6093706 - DNA, 25 bp, Homo sapien
gtgggagcggaagccaggttttgtg

SEQ ID NO: 6093707 - DNA, 25 bp, Homo sapien
ccagggcatgaaccatggctggctg

SEQ ID NO: 6093708 - DNA, 25 bp, Homo sapien
gagtgtggccacgagccagtgggag

SEQ ID NO: 6093709 - DNA, 25 bp, Homo sapien
gagggatgtgcagctgccgggccac

SEQ ID NO: 6093710 - DNA, 25 bp, Homo sapien
ggcctagtgctttagcctgggccac

SEQ ID NO: 6093711 - DNA, 25 bp, Homo sapien
ctccaggagaggccggcgcgcaaaa

SEQ ID NO: 6093712 - DNA, 25 bp, Homo sapien
ggcatcagtcaccacaggctcagac

SEQ ID NO: 6093713 - DNA, 25 bp, Homo sapien
gccgagtacagggacactaccttgc

SEQ ID NO: 6093714 - DNA, 25 bp, Homo sapien
taccttgccccatgtgatacctgct

SEQ ID NO: 6093715 - DNA, 25 bp, Homo sapien
tacctgctgagaagatgtggccggc

SEQ ID NO: 6093716 - DNA, 25 bp, Homo sapien
ggccaaagctgcagagtgtggccac

SEQ ID NO: 6093717 - DNA, 25 bp, Homo sapien
gctgccgggccacattccgatatac

SEQ ID NO: 6093718 - DNA, 25 bp, Homo sapien
agctccttgtctgtgggccagcgat

SEQ ID NO: 6093719 - DNA, 25 bp, Homo sapien
ggaagcggccaaagctgcagagtgt

SEQ ID NO: 6093720 - DNA, 25 bp, Homo sapien
ggacactaccttgccccatgtgata

SEQ ID NO: 6093721 - DNA, 25 bp, Homo sapien
ctggctgagcttgccggacgcagtc

SEQ ID NO: 6093722 - DNA, 25 bp, Homo sapien
ctgagaagatgtggccggccacagc

SEQ ID NO: 6093723 - DNA, 25 bp, Homo sapien
ggacgcagtccaccgctagtcccgc

SEQ ID NO: 6093724 - DNA, 25 bp, Homo sapien
gccggccacagcgaggaaggcatca

SEQ ID NO: 6093725 - DNA, 25 bp, Homo sapien
acttgaggacgtccgtccatccacc

SEQ ID NO: 6093726 - DNA, 25 bp, Homo sapien
ctgctccagctcatctcccaagcgc

SEQ ID NO: 6093727 - DNA, 25 bp, Homo sapien
cagctcatctcccaagcgcagcagc

SEQ ID NO: 6093728 - DNA, 25 bp, Homo sapien
ccaggtagccaaggtcttgcgtaca

SEQ ID NO: 6093729 - DNA, 25 bp, Homo sapien
agtcaaccagggcatgaaccatggc

SEQ ID NO: 6093730 - DNA, 25 bp, Homo sapien
acggatctgctccagctcatctccc

SEQ ID NO: 6093731 - DNA, 25 bp, Homo sapien
catgaaccatggctggctgagcttg

SEQ ID NO: 6093732 - DNA, 25 bp, Homo sapien
agtcaccacaggctcagactgcaga

SEQ ID NO: 6093733 - DNA, 25 bp, Homo sapien
ccaggcgtcctccaggggcaggcga

SEQ ID NO: 6093734 - DNA, 25 bp, Homo sapien
gagccagtgggagcggaagccaggt

SEQ ID NO: 6093735 - DNA, 25 bp, Homo sapien
cccaagcgcagcagcacggtgcaca

SEQ ID NO: 6093736 - DNA, 25 bp, Homo sapien
tcaaaggcgtccatgatctccgcag

SEQ ID NO: 6093737 - DNA, 25 bp, Homo sapien
tccgcagcgaagaccgaagagcgcc

SEQ ID NO: 6093738 - DNA, 25 bp, Homo sapien
cacaggctcagactgcagagggatg

SEQ ID NO: 6093739 - DNA, 25 bp, Homo sapien
gctgggacggatctgctccagctca

SEQ ID NO: 6093740 - DNA, 25 bp, Homo sapien
cacacacttgaggacgtccgtccat

SEQ ID NO: 6093741 - DNA, 25 bp, Homo sapien
gcagccgccgagtacagggacacta

SEQ ID NO: 6093742 - DNA, 25 bp, Homo sapien
gctgaccacacacttgaggacgtcc

SEQ ID NO: 6093743 - DNA, 25 bp, Homo sapien
ccggcgcgcaaaagccgcgcgtgca

SEQ ID NO: 6093744 - DNA, 25 bp, Homo sapien
ggagcgctccaggagaggccggcgc

SEQ ID NO: 6093745 - DNA, 25 bp, Homo sapien
ggccacgagccagtgggagcggaag

SEQ ID NO: 6093746 - DNA, 25 bp, Homo sapien
gaggaaggcatcagtcaccacaggc

SEQ ID NO: 6093747 - DNA, 25 bp, Homo sapien
gccaggttttgtgctgaccacacac

SEQ ID NO: 6093748 - DNA, 25 bp, Homo sapien
tgagcttgccggacgcagtccaccg

SEQ ID NO: 6093749 - DNA, 25 bp, Homo sapien
ccaggggcaggcgaggcacgctctg

SEQ ID NO: 6093750 - DNA, 25 bp, Homo sapien
cgcaaaagccgcgcgtgcacgtact

SEQ ID NO: 6093751 - DNA, 25 bp, Homo sapien
cgcagcagcacggtgcacacctctg

SEQ ID NO: 6093752 - DNA, 25 bp, Homo sapien
agccaaggtcttgcgtacaaattcc

SEQ ID NO: 6093753 - DNA, 25 bp, Homo sapien
gagaggccggcgcgcaaaagccgcg

SEQ ID NO: 6093754 - DNA, 25 bp, Homo sapien
gtgcacacctctgccaggcgtcctc

SEQ ID NO: 6093755 - DNA, 25 bp, Homo sapien
tgccccatgtgatacctgctgagaa

SEQ ID NO: 6093756 - DNA, 25 bp, Homo sapien
gtgctttagcctgggccaccagctc

SEQ ID NO: 6093757 - DNA, 25 bp, Homo sapien
cacagcgaggaaggcatcagtcacc

SEQ ID NO: 6093758 - DNA, 25 bp, Homo sapien
gacgtccgtccatccaccacgcctc

SEQ ID NO: 6093759 - DNA, 25 bp, Homo sapien
gtcttgcgtacaaattcccccaggc

SEQ ID NO: 6093760 - DNA, 25 bp, Homo sapien
agtccaccgctagtcccgcagccgc

SEQ ID NO: 6093761 - DNA, 25 bp, Homo sapien
gcgtccatgatctccgcagcgaaga

SEQ ID NO: 6093762 - DNA, 25 bp, Homo sapien
ttgtctgtgggccagcgatcaaagg

SEQ ID NO: 6093763 - DNA, 25 bp, Homo sapien
gggccacattccgatatacgctggg

SEQ ID NO: 6093764 - DNA, 25 bp, Homo sapien
agcctgggccaccagctccttgtct

SEQ ID NO: 6093765 - DNA, 25 bp, Homo sapien
atgtgatacctgctgagaagatgtg

SEQ ID NO: 6093766 - DNA, 25 bp, Homo sapien
gtcctccaggggcaggcgaggcacg

SEQ ID NO: 6093767 - DNA, 25 bp, Homo sapien
cacgtactcccggcctagtgcttta

SEQ ID NO: 6093768 - DNA, 25 bp, Homo sapien
tgtgcagctgccgggccacattccg

SEQ ID NO: 6093769 - DNA, 25 bp, Homo sapien
cattccgatatacgctgggacggat

SEQ ID NO: 6093770 - DNA, 25 bp, Homo sapien
agcacggtgcacacctctgccaggc

SEQ ID NO: 6093771 - DNA, 25 bp, Homo sapien
gcggaagccaggttttgtgctgacc

SEQ ID NO: 6093772 - DNA, 25 bp, Homo sapien
atatacgctgggacggatctgctcc

SEQ ID NO: 6093773 - DNA, 25 bp, Homo sapien
cgtacaaattcccccaggcagtcaa

SEQ ID NO: 6093774 - DNA, 25 bp, Homo sapien
gcgtgcacgtactcccggcctagtg

SEQ ID NO: 6093775 - DNA, 25 bp, Homo sapien
ggcaggcgaggcacgctctggagcg

SEQ ID NO: 6093776 - DNA, 25 bp, Homo sapien
ccatggctggctgagcttgccggac

SEQ ID NO: 6093777 - DNA, 25 bp, Homo sapien
cgctctggagcgctccaggagaggc

SEQ ID NO: 6093778 - DNA, 25 bp, Homo sapien
cgaggcacgctctggagcgctccag

SEQ ID NO: 6093779 - DNA, 25 bp, Homo sapien
ttgccggacgcagtccaccgctagt

SEQ ID NO: 6093780 - DNA, 25 bp, Homo sapien
cgtccatccaccacgcctccgaagc

SEQ ID NO: 6093781 - DNA, 25 bp, Homo sapien
atctcccaagcgcagcagcacggtg

SEQ ID NO: 6093782 - DNA, 25 bp, Homo sapien
aattcccccaggcagtcaaccaggg

SEQ ID NO: 6093783 - DNA, 25 bp, Homo sapien
ttttgtgctgaccacacacttgagg

SEQ ID NO: 6093784 - DNA, 25 bp, Homo sapien
cctctgccaggcgtcctccaggggc

SEQ ID NO: 6093785 - DNA, 25 bp, Homo sapien
ccgaagccaggtagccaaggtcttg

SEQ ID NO: 6093786 - DNA, 25 bp, Homo sapien
tccaccacgcctccgaagccaggta

SEQ ID NO: 6093787 - DNA, 25 bp, Homo sapien
agccgcgcgtgcacgtactcccggc

SEQ ID NO: 6093788 - DNA, 25 bp, Homo sapien
atgatctccgcagcgaagaccgaag

SEQ ID NO: 6093789 - DNA, 25 bp, Homo sapien
ggccaccagctccttgtctgtgggc

SEQ ID NO: 6093790 - DNA, 25 bp, Homo sapien
agctgcagagtgtggccacgagcca

SEQ ID NO: 6093791 - DNA, 25 bp, Homo sapien
ctcagactgcagagggatgtgcagc

SEQ ID NO: 6093792 - DNA, 25 bp, Homo sapien
actgcagagggatgtgcagctgccg

SEQ ID NO: 6093793 - DNA, 25 bp, Homo sapien
agtcccgcagccgccgagtacaggg

SEQ ID NO: 6093794 - DNA, 25 bp, Homo sapien
ctccaatagagattacaatagagat

SEQ ID NO: 6093795 - DNA, 25 bp, Homo sapien
tccaatagagattacaatagagatc

SEQ ID NO: 6093796 - DNA, 25 bp, Homo sapien
tagagattacaatagagatctccaa

SEQ ID NO: 6093797 - DNA, 25 bp, Homo sapien
aatagagattacaatagagatctcc

SEQ ID NO: 6093798 - DNA, 25 bp, Homo sapien
gagattacaatagagatctccaaca

SEQ ID NO: 6093799 - DNA, 25 bp, Homo sapien
gatctccaacatgatttcatgcatt

SEQ ID NO: 6093800 - DNA, 25 bp, Homo sapien
ccaatagagattacaatagagatct

SEQ ID NO: 6093801 - DNA, 25 bp, Homo sapien
agagattacaatagagatctccaac

SEQ ID NO: 6093802 - DNA, 25 bp, Homo sapien
tctccaatagagattacaatagaga

SEQ ID NO: 6093803 - DNA, 25 bp, Homo sapien
gattacaatagagatctccaacatg

SEQ ID NO: 6093804 - DNA, 25 bp, Homo sapien
aaaattgtgcggatgtggcttctgg

SEQ ID NO: 6093805 - DNA, 25 bp, Homo sapien
agattacaatagagatctccaacat

SEQ ID NO: 6093806 - DNA, 25 bp, Homo sapien
tggtgatcctcctccgagcggtagt

SEQ ID NO: 6093807 - DNA, 25 bp, Homo sapien
cagagcagtagtaatccgcgtcgtc

SEQ ID NO: 6093808 - DNA, 25 bp, Homo sapien
gtaccaggacacaccgtagtccctg

SEQ ID NO: 6093809 - DNA, 25 bp, Homo sapien
gactaaagccgtagccaacagagca

SEQ ID NO: 6093810 - DNA, 25 bp, Homo sapien
gtaatccgcgtcgtcttcaggctgc

SEQ ID NO: 6093811 - DNA, 25 bp, Homo sapien
tccttggctgccgagaatcgatcgg

SEQ ID NO: 6093812 - DNA, 25 bp, Homo sapien
cctgggaagaccagcagtgcatcca

SEQ ID NO: 6093813 - DNA, 25 bp, Homo sapien
cttcaggctgcacgggactaatggt

SEQ ID NO: 6093814 - DNA, 25 bp, Homo sapien
gtcagcaggccggtggtgatcctcc

SEQ ID NO: 6093815 - DNA, 25 bp, Homo sapien
gccacttggcctgggaagaccagca

SEQ ID NO: 6093816 - DNA, 25 bp, Homo sapien
gcacgggactaatggtgaggacaca

SEQ ID NO: 6093817 - DNA, 25 bp, Homo sapien
tccgagcggtagtagaggagatatc

SEQ ID NO: 6093818 - DNA, 25 bp, Homo sapien
acatttatcccaacataactccatg

SEQ ID NO: 6093819 - DNA, 25 bp, Homo sapien
ctgtgcagtaaactgcgccttctgc

SEQ ID NO: 6093820 - DNA, 25 bp, Homo sapien
gtgcagtaaactgcgccttctgctg

SEQ ID NO: 6093821 - DNA, 25 bp, Homo sapien
atttatcccaacataactccatgaa

SEQ ID NO: 6093822 - DNA, 25 bp, Homo sapien
aaaccgactggtgatggcaagagtg

SEQ ID NO: 6093823 - DNA, 25 bp, Homo sapien
tatcccaacataactccatgaagtg

SEQ ID NO: 6093824 - DNA, 25 bp, Homo sapien
cagctggagagacaattttcagtgc

SEQ ID NO: 6093825 - DNA, 25 bp, Homo sapien
tttatcccaacataactccatgaag

SEQ ID NO: 6093826 - DNA, 25 bp, Homo sapien
cacatttatcccaacataactccat

SEQ ID NO: 6093827 - DNA, 25 bp, Homo sapien
catttatcccaacataactccatga

SEQ ID NO: 6093828 - DNA, 25 bp, Homo sapien
tgtgcagtaaactgcgccttctgct

SEQ ID NO: 6093829 - DNA, 25 bp, Homo sapien
ttatcccaacataactccatgaagt

SEQ ID NO: 6093830 - DNA, 25 bp, Homo sapien
tccaggcgtccatgtagcggtccat

SEQ ID NO: 6093831 - DNA, 25 bp, Homo sapien
gttggccacggcgatctgcactttc

SEQ ID NO: 6093832 - DNA, 25 bp, Homo sapien
ttccaggcgtccatgtagcggtcca

SEQ ID NO: 6093833 - DNA, 25 bp, Homo sapien
ttggccacggcgatctgcactttca

SEQ ID NO: 6093834 - DNA, 25 bp, Homo sapien
cagctcctgcgcgttggccacggcg

SEQ ID NO: 6093835 - DNA, 25 bp, Homo sapien
agcggtccatgcacatggcgatgca

SEQ ID NO: 6093836 - DNA, 25 bp, Homo sapien
ccaggcgtccatgtagcggtccatg

SEQ ID NO: 6093837 - DNA, 25 bp, Homo sapien
tggccacggcgatctgcactttcac

SEQ ID NO: 6093838 - DNA, 25 bp, Homo sapien
agctcctgcgcgttggccacggcga

SEQ ID NO: 6093839 - DNA, 25 bp, Homo sapien
cgggcttcccgatgcacttccggaa

SEQ ID NO: 6093840 - DNA, 25 bp, Homo sapien
gccaaaatccgagccgaagccgctg

SEQ ID NO: 6093841 - DNA, 25 bp, Homo sapien
acacttgtccgtcattctctggagc

SEQ ID NO: 6093842 - DNA, 25 bp, Homo sapien
tgctccgagttatccaaggagcccc

SEQ ID NO: 6093843 - DNA, 25 bp, Homo sapien
cacttgtccgtcattctctggagca

SEQ ID NO: 6093844 - DNA, 25 bp, Homo sapien
tttctgctccgagttatccaaggag

SEQ ID NO: 6093845 - DNA, 25 bp, Homo sapien
gcttcccgatgcacttccggaaaca

SEQ ID NO: 6093846 - DNA, 25 bp, Homo sapien
catttctgctccgagttatccaagg

SEQ ID NO: 6093847 - DNA, 25 bp, Homo sapien
aatccgagccgaagccgctgtccat

SEQ ID NO: 6093848 - DNA, 25 bp, Homo sapien
cgtgccgccaaaatccgagccgaag

SEQ ID NO: 6093849 - DNA, 25 bp, Homo sapien
gatgcatttctgctccgagttatcc

SEQ ID NO: 6093850 - DNA, 25 bp, Homo sapien
ggcgatgcatttctgctccgagtta

SEQ ID NO: 6093851 - DNA, 25 bp, Homo sapien
ttcatcctgcatagacaactctgtc

SEQ ID NO: 6093852 - DNA, 25 bp, Homo sapien
tccaggtacttagagacacatcggt

SEQ ID NO: 6093853 - DNA, 25 bp, Homo sapien
tgttgtacatatcggccatcatctc

SEQ ID NO: 6093854 - DNA, 25 bp, Homo sapien
tctgtcaactttttgcccatccgct

SEQ ID NO: 6093855 - DNA, 25 bp, Homo sapien
gatgtccaggtacttagagacacat

SEQ ID NO: 6093856 - DNA, 25 bp, Homo sapien
gactcgcccttggagagctctgctt

SEQ ID NO: 6093857 - DNA, 25 bp, Homo sapien
gcttccttgtagtgaggaggcacac

SEQ ID NO: 6093858 - DNA, 25 bp, Homo sapien
gaggaggcacacacttccggtggca

SEQ ID NO: 6093859 - DNA, 25 bp, Homo sapien
ttagagacacatcggtccaggcaca

SEQ ID NO: 6093860 - DNA, 25 bp, Homo sapien
aactttttgcccatccgctcatgga

SEQ ID NO: 6093861 - DNA, 25 bp, Homo sapien
cacagactcgcccttggagagctct

SEQ ID NO: 6093862 - DNA, 25 bp, Homo sapien
cagctcttcatcctgcatagacaac

SEQ ID NO: 6093863 - DNA, 25 bp, Homo sapien
catgaagagtaccttgagcatcatc

SEQ ID NO: 6093864 - DNA, 25 bp, Homo sapien
tggtcgtagatagcgtccgcgcctt

SEQ ID NO: 6093865 - DNA, 25 bp, Homo sapien
tatttcctgagcatgctgactaaac

SEQ ID NO: 6093866 - DNA, 25 bp, Homo sapien
cgaaggcgcgctcgaagaacatgac

SEQ ID NO: 6093867 - DNA, 25 bp, Homo sapien
cgaagaacatgacgcccacgatgat

SEQ ID NO: 6093868 - DNA, 25 bp, Homo sapien
tttcttgccaacagcgaatggtggt

SEQ ID NO: 6093869 - DNA, 25 bp, Homo sapien
catgacgcccacgatgatggtgagg

SEQ ID NO: 6093870 - DNA, 25 bp, Homo sapien
cccctcgttgatgtggtcgtagata

SEQ ID NO: 6093871 - DNA, 25 bp, Homo sapien
cgaatggtggtccatgaagagtacc

SEQ ID NO: 6093872 - DNA, 25 bp, Homo sapien
ttcgaagtcaacgtcgcggccgcca

SEQ ID NO: 6093873 - DNA, 25 bp, Homo sapien
tgatgtggtcgtagatagcgtccgc

SEQ ID NO: 6093874 - DNA, 25 bp, Homo sapien
tagcgtccgcgccttgatcgaaggc

SEQ ID NO: 6093875 - DNA, 25 bp, Homo sapien
taaaatagccaataggacctgcaaa

SEQ ID NO: 6093876 - DNA, 25 bp, Homo sapien
ccggcaccagcaaataaagttgctc

SEQ ID NO: 6093877 - DNA, 25 bp, Homo sapien
acaatcccggcaccagcaaataaag

SEQ ID NO: 6093878 - DNA, 25 bp, Homo sapien
ctgcaaacaagccacgaggtgtctt

SEQ ID NO: 6093879 - DNA, 25 bp, Homo sapien
agggccgcttcacgtgggacgccac

SEQ ID NO: 6093880 - DNA, 25 bp, Homo sapien
tctcatgggtcgcaatgtaatacag

SEQ ID NO: 6093881 - DNA, 25 bp, Homo sapien
ttcttgttgcgcatcggagtcagcc

SEQ ID NO: 6093882 - DNA, 25 bp, Homo sapien
cgccgccgtagcgatctgaccacct

SEQ ID NO: 6093883 - DNA, 25 bp, Homo sapien
agccactaaccgttccggtgttgct

SEQ ID NO: 6093884 - DNA, 25 bp, Homo sapien
aaatttcaacccagtttcttcatat

SEQ ID NO: 6093885 - DNA, 25 bp, Homo sapien
gacatattgatgttcaatgcggttt

SEQ ID NO: 6093886 - DNA, 25 bp, Homo sapien
gatacttgccacgacatattgatgt

SEQ ID NO: 6093887 - DNA, 25 bp, Homo sapien
cgtcgctgcgtttgattcacataca

SEQ ID NO: 6093888 - DNA, 25 bp, Homo sapien
caaattccccactattatctgcggt

SEQ ID NO: 6093889 - DNA, 25 bp, Homo sapien
atcggagtcagccacaatcccggca

SEQ ID NO: 6093890 - DNA, 25 bp, Homo sapien
taggacctgcaaacaagccacgagg

SEQ ID NO: 6093891 - DNA, 25 bp, Homo sapien
gttcaatgcggtttttctgactggc

SEQ ID NO: 6093892 - DNA, 25 bp, Homo sapien
caagcgtgtcgtgatacttgccacg

SEQ ID NO: 6093893 - DNA, 25 bp, Homo sapien
tttttgagtaaacttggcatggccg

SEQ ID NO: 6093894 - DNA, 25 bp, Homo sapien
aatgtgccgcaatgtcccctgtaat

SEQ ID NO: 6093895 - DNA, 25 bp, Homo sapien
caatgtaatacagggccgcttcacg

SEQ ID NO: 6093896 - DNA, 25 bp, Homo sapien
atggccggcacctttagcgacgtcg

SEQ ID NO: 6093897 - DNA, 25 bp, Homo sapien
ttgtcccagcgaccgccgccgtagc

SEQ ID NO: 6093898 - DNA, 25 bp, Homo sapien
atccgtcccgcgccggcttgtccca

SEQ ID NO: 6093899 - DNA, 25 bp, Homo sapien
ctaacaacgcttcgcctaacgcgat

SEQ ID NO: 6093900 - DNA, 25 bp, Homo sapien
gcggtcaacaatcgcggtcacactt

SEQ ID NO: 6093901 - DNA, 25 bp, Homo sapien
gactggctaacaacgcttcgcctaa

SEQ ID NO: 6093902 - DNA, 25 bp, Homo sapien
acatacatggaacggatgccaacca

SEQ ID NO: 6093903 - DNA, 25 bp, Homo sapien
acgcgatatcgtcagcgccatccgt

SEQ ID NO: 6093904 - DNA, 25 bp, Homo sapien
catgggttcaaatttcaacccagtt

SEQ ID NO: 6093905 - DNA, 25 bp, Homo sapien
tgccacgacatattgatgttcaatg

SEQ ID NO: 6093906 - DNA, 25 bp, Homo sapien
gcttcacgtgggacgccacccagtg

SEQ ID NO: 6093907 - DNA, 25 bp, Homo sapien
ccgcaatgtcccctgtaattggtgt

SEQ ID NO: 6093908 - DNA, 25 bp, Homo sapien
gtgtacaaatgctgaacttgcttat

SEQ ID NO: 6093909 - DNA, 25 bp, Homo sapien
gtgtcttctcatgggtcgcaatgta

SEQ ID NO: 6093910 - DNA, 25 bp, Homo sapien
cgtcacgtcttgcaagcgtgtcgtg

SEQ ID NO: 6093911 - DNA, 25 bp, Homo sapien
acaagccacgaggtgtcttctcatg

SEQ ID NO: 6093912 - DNA, 25 bp, Homo sapien
atgtcccctgtaattggtgtgtaca

SEQ ID NO: 6093913 - DNA, 25 bp, Homo sapien
cttggcatggccggcacctttagcg

SEQ ID NO: 6093914 - DNA, 25 bp, Homo sapien
atgcaagcggtcaacaatcgcggtc

SEQ ID NO: 6093915 - DNA, 25 bp, Homo sapien
cgtagcgatctgaccacctgacata

SEQ ID NO: 6093916 - DNA, 25 bp, Homo sapien
cgacgtcgtcacgtcttgcaagcgt

SEQ ID NO: 6093917 - DNA, 25 bp, Homo sapien
attggtgtgtacaaatgctgaactt

SEQ ID NO: 6093918 - DNA, 25 bp, Homo sapien
agtaaacttggcatggccggcacct

SEQ ID NO: 6093919 - DNA, 25 bp, Homo sapien
ccagcaaataaagttgctcgtcgct

SEQ ID NO: 6093920 - DNA, 25 bp, Homo sapien
ttcatattcttgttgcgcatcggag

SEQ ID NO: 6093921 - DNA, 25 bp, Homo sapien
taaccgttccggtgttgctgaaata

SEQ ID NO: 6093922 - DNA, 25 bp, Homo sapien
ttttctgactggctaacaacgcttc

SEQ ID NO: 6093923 - DNA, 25 bp, Homo sapien
cacgaggtgtcttctcatgggtcgc

SEQ ID NO: 6093924 - DNA, 25 bp, Homo sapien
tgctggtgttggatgcaagcggtca

SEQ ID NO: 6093925 - DNA, 25 bp, Homo sapien
gttgctcgtcgctgcgtttgattca

SEQ ID NO: 6093926 - DNA, 25 bp, Homo sapien
tgcggtttttctgactggctaacaa

SEQ ID NO: 6093927 - DNA, 25 bp, Homo sapien
ggcacctttagcgacgtcgtcacgt

SEQ ID NO: 6093928 - DNA, 25 bp, Homo sapien
ccggtgttgctgaaataaacaattc

SEQ ID NO: 6093929 - DNA, 25 bp, Homo sapien
ttgccgcatgggttcaaatttcaac

SEQ ID NO: 6093930 - DNA, 25 bp, Homo sapien
tgattcacatacatggaacggatgc

SEQ ID NO: 6093931 - DNA, 25 bp, Homo sapien
agcgccatccgtcccgcgccggctt

SEQ ID NO: 6093932 - DNA, 25 bp, Homo sapien
gtcttgcaagcgtgtcgtgatactt

SEQ ID NO: 6093933 - DNA, 25 bp, Homo sapien
ttgatgttcaatgcggtttttctga

SEQ ID NO: 6093934 - DNA, 25 bp, Homo sapien
gatctgaccacctgacatagccact

SEQ ID NO: 6093935 - DNA, 25 bp, Homo sapien
gggtcgcaatgtaatacagggccgc

SEQ ID NO: 6093936 - DNA, 25 bp, Homo sapien
aataaagttgctcgtcgctgcgttt

SEQ ID NO: 6093937 - DNA, 25 bp, Homo sapien
agccaataggacctgcaaacaagcc

SEQ ID NO: 6093938 - DNA, 25 bp, Homo sapien
acgtgggacgccacccagtgctggt

SEQ ID NO: 6093939 - DNA, 25 bp, Homo sapien
tgtcgtgatacttgccacgacatat

SEQ ID NO: 6093940 - DNA, 25 bp, Homo sapien
tcccgcgccggcttgtcccagcgac

SEQ ID NO: 6093941 - DNA, 25 bp, Homo sapien
ctgcggtaaaatagccaataggacc

SEQ ID NO: 6093942 - DNA, 25 bp, Homo sapien
ttgcgcatcggagtcagccacaatc

SEQ ID NO: 6093943 - DNA, 25 bp, Homo sapien
tgttggatgcaagcggtcaacaatc

SEQ ID NO: 6093944 - DNA, 25 bp, Homo sapien
accacctgacatagccactaaccgt

SEQ ID NO: 6093945 - DNA, 25 bp, Homo sapien
agtttcttcatattcttgttgcgca

SEQ ID NO: 6093946 - DNA, 25 bp, Homo sapien
tgcgtttgattcacatacatggaac

SEQ ID NO: 6093947 - DNA, 25 bp, Homo sapien
ggatgccaaccacaaattccccact

SEQ ID NO: 6093948 - DNA, 25 bp, Homo sapien
tgacatagccactaaccgttccggt

SEQ ID NO: 6093949 - DNA, 25 bp, Homo sapien
tggaacggatgccaaccacaaattc

SEQ ID NO: 6093950 - DNA, 25 bp, Homo sapien
tgcttatttttgagtaaacttggca

SEQ ID NO: 6093951 - DNA, 25 bp, Homo sapien
gcctaacgcgatatcgtcagcgcca

SEQ ID NO: 6093952 - DNA, 25 bp, Homo sapien
ccccactattatctgcggtaaaata

SEQ ID NO: 6093953 - DNA, 25 bp, Homo sapien
cgcttcgcctaacgcgatatcgtca

SEQ ID NO: 6093954 - DNA, 25 bp, Homo sapien
aatacagggccgcttcacgtgggac

SEQ ID NO: 6093955 - DNA, 25 bp, Homo sapien
tgaacttgcttatttttgagtaaac

SEQ ID NO: 6093956 - DNA, 25 bp, Homo sapien
ctttagcgacgtcgtcacgtcttgc

SEQ ID NO: 6093957 - DNA, 25 bp, Homo sapien
gcggtcacacttaaatgtgccgcaa

SEQ ID NO: 6093958 - DNA, 25 bp, Homo sapien
gccggcttgtcccagcgaccgccgc

SEQ ID NO: 6093959 - DNA, 25 bp, Homo sapien
acacttaaatgtgccgcaatgtccc

SEQ ID NO: 6093960 - DNA, 25 bp, Homo sapien
tattatctgcggtaaaatagccaat

SEQ ID NO: 6093961 - DNA, 25 bp, Homo sapien
gacgccacccagtgctggtgttgga

SEQ ID NO: 6093962 - DNA, 25 bp, Homo sapien
caacccagtttcttcatattcttgt

SEQ ID NO: 6093963 - DNA, 25 bp, Homo sapien
acaatcgcggtcacacttaaatgtg

SEQ ID NO: 6093964 - DNA, 25 bp, Homo sapien
cctgtaattggtgtgtacaaatgct

SEQ ID NO: 6093965 - DNA, 25 bp, Homo sapien
caaccacaaattccccactattatc

SEQ ID NO: 6093966 - DNA, 25 bp, Homo sapien
acccagtgctggtgttggatgcaag

SEQ ID NO: 6093967 - DNA, 25 bp, Homo sapien
aaatgctgaacttgcttatttttga

SEQ ID NO: 6093968 - DNA, 25 bp, Homo sapien
agcgaccgccgccgtagcgatctga

SEQ ID NO: 6093969 - DNA, 25 bp, Homo sapien
tagagggaaatagtgtgcagttact

SEQ ID NO: 6093970 - DNA, 25 bp, Homo sapien
tcctaacctggcatgaagcttcttt

SEQ ID NO: 6093971 - DNA, 25 bp, Homo sapien
gtacaggcataactattgtcagtgc

SEQ ID NO: 6093972 - DNA, 25 bp, Homo sapien
catgctccttagtacaggcataact

SEQ ID NO: 6093973 - DNA, 25 bp, Homo sapien
cacacttcatttagccccacttttg

SEQ ID NO: 6093974 - DNA, 25 bp, Homo sapien
tccattcaaaccaggtccccagatg

SEQ ID NO: 6093975 - DNA, 25 bp, Homo sapien
gatagggtttactcagtagagggaa

SEQ ID NO: 6093976 - DNA, 25 bp, Homo sapien
gcataactattgtcagtgctgcctg

SEQ ID NO: 6093977 - DNA, 25 bp, Homo sapien
tcatttagccccacttttgcatgga

SEQ ID NO: 6093978 - DNA, 25 bp, Homo sapien
tagtgtgcagttactaatgtcccac

SEQ ID NO: 6093979 - DNA, 25 bp, Homo sapien
gctgccttcctaacctggcatgaag

SEQ ID NO: 6093980 - DNA, 25 bp, Homo sapien
ttactaatgtcccacttagccgacc

SEQ ID NO: 6093981 - DNA, 25 bp, Homo sapien
cctgcaagaggcagttgggccaaag

SEQ ID NO: 6093982 - DNA, 25 bp, Homo sapien
tcgggaggctccctcattcgggcca

SEQ ID NO: 6093983 - DNA, 25 bp, Homo sapien
gggaggctccctcattcgggccaaa

SEQ ID NO: 6093984 - DNA, 25 bp, Homo sapien
tccttcgggaggctccctcattcgg

SEQ ID NO: 6093985 - DNA, 25 bp, Homo sapien
ttaatccttcgggaggctccctcat

SEQ ID NO: 6093986 - DNA, 25 bp, Homo sapien
gaggctccctcattcgggccaaaaa

SEQ ID NO: 6093987 - DNA, 25 bp, Homo sapien
cttcgggaggctccctcattcgggc

SEQ ID NO: 6093988 - DNA, 25 bp, Homo sapien
tgaggatcggggcgtcgtttaatcc

SEQ ID NO: 6093989 - DNA, 25 bp, Homo sapien
ggaggctccctcattcgggccaaaa

SEQ ID NO: 6093990 - DNA, 25 bp, Homo sapien
ctgcaagaggcagttgggccaaagc

SEQ ID NO: 6093991 - DNA, 25 bp, Homo sapien
gcctgcaagaggcagttgggccaaa

SEQ ID NO: 6093992 - DNA, 25 bp, Homo sapien
taatccttcgggaggctccctcatt

SEQ ID NO: 6093993 - DNA, 25 bp, Homo sapien
tgcaagccgaggagagactggactt

SEQ ID NO: 6093994 - DNA, 25 bp, Homo sapien
tctgacgcccctttgcaaacacagc

SEQ ID NO: 6093995 - DNA, 25 bp, Homo sapien
cttctctgacgcccctttgcaaaca

SEQ ID NO: 6093996 - DNA, 25 bp, Homo sapien
tctctgacgcccctttgcaaacaca

SEQ ID NO: 6093997 - DNA, 25 bp, Homo sapien
tctctctgtttacatctgggagaaa

SEQ ID NO: 6093998 - DNA, 25 bp, Homo sapien
gtctctctgtttacatctgggagaa

SEQ ID NO: 6093999 - DNA, 25 bp, Homo sapien
ttctctgacgcccctttgcaaacac

SEQ ID NO: 6094000 - DNA, 25 bp, Homo sapien
gcaagccgaggagagactggacttt

SEQ ID NO: 6094001 - DNA, 25 bp, Homo sapien
ctctgacgcccctttgcaaacacag

SEQ ID NO: 6094002 - DNA, 25 bp, Homo sapien
acttctctgacgcccctttgcaaac

SEQ ID NO: 6094003 - DNA, 25 bp, Homo sapien
tccaactaactcagcacaacagggc

SEQ ID NO: 6094004 - DNA, 25 bp, Homo sapien
cccgtcaccagtgccgccaagggca

SEQ ID NO: 6094005 - DNA, 25 bp, Homo sapien
cagggagcttgaattctgttccaac

SEQ ID NO: 6094006 - DNA, 25 bp, Homo sapien
aactaactcagcacaacagggccat

SEQ ID NO: 6094007 - DNA, 25 bp, Homo sapien
acagggccataacagtcctgacagc

SEQ ID NO: 6094008 - DNA, 25 bp, Homo sapien
ggtggactagtgcagggagcttgaa

SEQ ID NO: 6094009 - DNA, 25 bp, Homo sapien
aattctgttccaactaactcagcac

SEQ ID NO: 6094010 - DNA, 25 bp, Homo sapien
cctgacagccccgtcaccagtgccg

SEQ ID NO: 6094011 - DNA, 25 bp, Homo sapien
caactaactcagcacaacagggcca

SEQ ID NO: 6094012 - DNA, 25 bp, Homo sapien
taactcagcacaacagggccataac

SEQ ID NO: 6094013 - DNA, 25 bp, Homo sapien
attctgttccaactaactcagcaca

SEQ ID NO: 6094014 - DNA, 25 bp, Homo sapien
aactcagcacaacagggccataaca

SEQ ID NO: 6094015 - DNA, 25 bp, Homo sapien
gggtatgagttcgatacgtgactct

SEQ ID NO: 6094016 - DNA, 25 bp, Homo sapien
agacgtaagcgaagcatatctataa

SEQ ID NO: 6094017 - DNA, 25 bp, Homo sapien
agttttgcgagactcgacgagcaag

SEQ ID NO: 6094018 - DNA, 25 bp, Homo sapien
tttccacaggcttcacaatcttttc

SEQ ID NO: 6094019 - DNA, 25 bp, Homo sapien
agttgtccatccaatcaacgatctt

SEQ ID NO: 6094020 - DNA, 25 bp, Homo sapien
attgttcaacaaacccacaagctta

SEQ ID NO: 6094021 - DNA, 25 bp, Homo sapien
caactctcatgcaaagctaaagact

SEQ ID NO: 6094022 - DNA, 25 bp, Homo sapien
tttgaaggtacggattcgcttgaca

SEQ ID NO: 6094023 - DNA, 25 bp, Homo sapien
aaagctaaagactgacacaatcgga

SEQ ID NO: 6094024 - DNA, 25 bp, Homo sapien
attttaaaaatcctaatctgccagt

SEQ ID NO: 6094025 - DNA, 25 bp, Homo sapien
ggaacaataacacatcggtcttacg

SEQ ID NO: 6094026 - DNA, 25 bp, Homo sapien
ctcgacgagcaagccgataccgcat

SEQ ID NO: 6094027 - DNA, 25 bp, Homo sapien
cagaagggaacaataacacatcggt

SEQ ID NO: 6094028 - DNA, 25 bp, Homo sapien
tccaaagaagttagacgtaagcgaa

SEQ ID NO: 6094029 - DNA, 25 bp, Homo sapien
acttcgtagtcccgctaatcgtcgt

SEQ ID NO: 6094030 - DNA, 25 bp, Homo sapien
gcttgacaactctcatgcaaagcta

SEQ ID NO: 6094031 - DNA, 25 bp, Homo sapien
gatacgtgactctctaggggagtat

SEQ ID NO: 6094032 - DNA, 25 bp, Homo sapien
ggttgtacaatcaacttcgtagtcc

SEQ ID NO: 6094033 - DNA, 25 bp, Homo sapien
tggtacacactttattaaaactcga

SEQ ID NO: 6094034 - DNA, 25 bp, Homo sapien
gcgagactcgacgagcaagccgata

SEQ ID NO: 6094035 - DNA, 25 bp, Homo sapien
caacgtcggtgctcattcagaaggg

SEQ ID NO: 6094036 - DNA, 25 bp, Homo sapien
tgaaactttccacaggcttcacaat

SEQ ID NO: 6094037 - DNA, 25 bp, Homo sapien
ccgaggaaacggctgcgacgcatct

SEQ ID NO: 6094038 - DNA, 25 bp, Homo sapien
gaacaaagactcgtacttgcgggcg

SEQ ID NO: 6094039 - DNA, 25 bp, Homo sapien
aaatcctaatctgccagtttagcgg

SEQ ID NO: 6094040 - DNA, 25 bp, Homo sapien
cgcatctaaaatccactgcccacca

SEQ ID NO: 6094041 - DNA, 25 bp, Homo sapien
gcgttcggttgtacaatcaacttcg

SEQ ID NO: 6094042 - DNA, 25 bp, Homo sapien
agttgagagccttccaaagaagtta

SEQ ID NO: 6094043 - DNA, 25 bp, Homo sapien
cccattgggtatgagttcgatacgt

SEQ ID NO: 6094044 - DNA, 25 bp, Homo sapien
taggcaccgaggaaacggctgcgac

SEQ ID NO: 6094045 - DNA, 25 bp, Homo sapien
aaacggctgcgacgcatctaaaatc

SEQ ID NO: 6094046 - DNA, 25 bp, Homo sapien
cactgcccaccactgatactcaggc

SEQ ID NO: 6094047 - DNA, 25 bp, Homo sapien
aatcaacgatcttaggcaccgagga

SEQ ID NO: 6094048 - DNA, 25 bp, Homo sapien
cgatcttaggcaccgaggaaacggc

SEQ ID NO: 6094049 - DNA, 25 bp, Homo sapien
tcgcattggtacacactttattaaa

SEQ ID NO: 6094050 - DNA, 25 bp, Homo sapien
tcattcagaagggaacaataacaca

SEQ ID NO: 6094051 - DNA, 25 bp, Homo sapien
caatcggacctccacgaacagggtt

SEQ ID NO: 6094052 - DNA, 25 bp, Homo sapien
tgcgggcgttcggttgtacaatcaa

SEQ ID NO: 6094053 - DNA, 25 bp, Homo sapien
caactcggggagctgaaactttcca

SEQ ID NO: 6094054 - DNA, 25 bp, Homo sapien
actcgatcatcccaacgtcggtgct

SEQ ID NO: 6094055 - DNA, 25 bp, Homo sapien
ccatccaatcaacgatcttaggcac

SEQ ID NO: 6094056 - DNA, 25 bp, Homo sapien
gacctccacgaacagggttggaaca

SEQ ID NO: 6094057 - DNA, 25 bp, Homo sapien
gaagttagacgtaagcgaagcatat

SEQ ID NO: 6094058 - DNA, 25 bp, Homo sapien
tcttttcccattgggtatgagttcg

SEQ ID NO: 6094059 - DNA, 25 bp, Homo sapien
agactcgtacttgcgggcgttcggt

SEQ ID NO: 6094060 - DNA, 25 bp, Homo sapien
cgcatgcggatcaggcatccgtcct

SEQ ID NO: 6094061 - DNA, 25 bp, Homo sapien
agcatatctataattgttcaacaaa

SEQ ID NO: 6094062 - DNA, 25 bp, Homo sapien
attaaaactcgatcatcccaacgtc

SEQ ID NO: 6094063 - DNA, 25 bp, Homo sapien
tcatgcaaagctaaagactgacaca

SEQ ID NO: 6094064 - DNA, 25 bp, Homo sapien
cggtgctcattcagaagggaacaat

SEQ ID NO: 6094065 - DNA, 25 bp, Homo sapien
gcggatcaggcatccgtcctgaaaa

SEQ ID NO: 6094066 - DNA, 25 bp, Homo sapien
tcgtcgtactatagttttgcgagac

SEQ ID NO: 6094067 - DNA, 25 bp, Homo sapien
tccgtcctgaaaagttgagagcctt

SEQ ID NO: 6094068 - DNA, 25 bp, Homo sapien
gagttcgatacgtgactctctaggg

SEQ ID NO: 6094069 - DNA, 25 bp, Homo sapien
taaaggggtttcgcattggtacaca

SEQ ID NO: 6094070 - DNA, 25 bp, Homo sapien
ctgaaaagttgagagccttccaaag

SEQ ID NO: 6094071 - DNA, 25 bp, Homo sapien
gggagctgaaactttccacaggctt

SEQ ID NO: 6094072 - DNA, 25 bp, Homo sapien
cgctaatcgtcgtactatagttttg

SEQ ID NO: 6094073 - DNA, 25 bp, Homo sapien
catcggtcttacggcgttttgaagg

SEQ ID NO: 6094074 - DNA, 25 bp, Homo sapien
taaaatccactgcccaccactgata

SEQ ID NO: 6094075 - DNA, 25 bp, Homo sapien
ggattcgcttgacaactctcatgca

SEQ ID NO: 6094076 - DNA, 25 bp, Homo sapien
ataacacatcggtcttacggcgttt

SEQ ID NO: 6094077 - DNA, 25 bp, Homo sapien
tcacaatcttttcccattgggtatg

SEQ ID NO: 6094078 - DNA, 25 bp, Homo sapien
tctataattgttcaacaaacccaca

SEQ ID NO: 6094079 - DNA, 25 bp, Homo sapien
agcaagccgataccgcatgcggatc

SEQ ID NO: 6094080 - DNA, 25 bp, Homo sapien
ggtacggattcgcttgacaactctc

SEQ ID NO: 6094081 - DNA, 25 bp, Homo sapien
ctgcgacgcatctaaaatccactgc

SEQ ID NO: 6094082 - DNA, 25 bp, Homo sapien
cgaacagggttggaacaaagactcg

SEQ ID NO: 6094083 - DNA, 25 bp, Homo sapien
tgactctctaggggagtattaaagg

SEQ ID NO: 6094084 - DNA, 25 bp, Homo sapien
caggcatccgtcctgaaaagttgag

SEQ ID NO: 6094085 - DNA, 25 bp, Homo sapien
caggcttcacaatcttttcccattg

SEQ ID NO: 6094086 - DNA, 25 bp, Homo sapien
tgacacaatcggacctccacgaaca

SEQ ID NO: 6094087 - DNA, 25 bp, Homo sapien
caatcaacttcgtagtcccgctaat

SEQ ID NO: 6094088 - DNA, 25 bp, Homo sapien
ccgataccgcatgcggatcaggcat

SEQ ID NO: 6094089 - DNA, 25 bp, Homo sapien
gagccttccaaagaagttagacgta

SEQ ID NO: 6094090 - DNA, 25 bp, Homo sapien
gcttaaagttgtccatccaatcaac

SEQ ID NO: 6094091 - DNA, 25 bp, Homo sapien
gtacttgcgggcgttcggttgtaca

SEQ ID NO: 6094092 - DNA, 25 bp, Homo sapien
aaagactgacacaatcggacctcca

SEQ ID NO: 6094093 - DNA, 25 bp, Homo sapien
gggtttcgcattggtacacacttta

SEQ ID NO: 6094094 - DNA, 25 bp, Homo sapien
caacaaacccacaagcttaaagttg

SEQ ID NO: 6094095 - DNA, 25 bp, Homo sapien
aagcgaagcatatctataattgttc

SEQ ID NO: 6094096 - DNA, 25 bp, Homo sapien
cactttattaaaactcgatcatccc

SEQ ID NO: 6094097 - DNA, 25 bp, Homo sapien
taatctgccagtttagcggttttcc

SEQ ID NO: 6094098 - DNA, 25 bp, Homo sapien
ggttggaacaaagactcgtacttgc

SEQ ID NO: 6094099 - DNA, 25 bp, Homo sapien
tactatagttttgcgagactcgacg

SEQ ID NO: 6094100 - DNA, 25 bp, Homo sapien
ccacaagcttaaagttgtccatcca

SEQ ID NO: 6094101 - DNA, 25 bp, Homo sapien
tagtcccgctaatcgtcgtactata

SEQ ID NO: 6094102 - DNA, 25 bp, Homo sapien
tcatcccaacgtcggtgctcattca

SEQ ID NO: 6094103 - DNA, 25 bp, Homo sapien
ttttacgattgtagataagggaaga

SEQ ID NO: 6094104 - DNA, 25 bp, Homo sapien
cttttacgattgtagataagggaag

SEQ ID NO: 6094105 - DNA, 25 bp, Homo sapien
ccccatctcccctagtgctcccagg

SEQ ID NO: 6094106 - DNA, 25 bp, Homo sapien
cagaacctgccaacatgtgacgtct

SEQ ID NO: 6094107 - DNA, 25 bp, Homo sapien
ggagataaccttaaaggctggctgc

SEQ ID NO: 6094108 - DNA, 25 bp, Homo sapien
ttgtagataagggaagagataagcc

SEQ ID NO: 6094109 - DNA, 25 bp, Homo sapien
ttgctgggcatcacagaacctgcca

SEQ ID NO: 6094110 - DNA, 25 bp, Homo sapien
attttgccccggtcctctgatctca

SEQ ID NO: 6094111 - DNA, 25 bp, Homo sapien
tgaaatggctgctttgggaatgtct

SEQ ID NO: 6094112 - DNA, 25 bp, Homo sapien
aacttgctggttttgcggcttgctg

SEQ ID NO: 6094113 - DNA, 25 bp, Homo sapien
caatgcgtgcccgaaacttcactag

SEQ ID NO: 6094114 - DNA, 25 bp, Homo sapien
gaatgtctgtcttttacgattgtag

SEQ ID NO: 6094115 - DNA, 25 bp, Homo sapien
cttaaaggctggctgcctgtgggct

SEQ ID NO: 6094116 - DNA, 25 bp, Homo sapien
tttgcggcttgctgggcatcacaga

SEQ ID NO: 6094117 - DNA, 25 bp, Homo sapien
cttttacgattgtagataagggaag

SEQ ID NO: 6094118 - DNA, 25 bp, Homo sapien
ggaaagacatcctctgttcactgat

SEQ ID NO: 6094119 - DNA, 25 bp, Homo sapien
tcccagcacttcaggaggccaaagt

SEQ ID NO: 6094120 - DNA, 25 bp, Homo sapien
taaagacagacctacagtccaagga

SEQ ID NO: 6094121 - DNA, 25 bp, Homo sapien
gaatctcaagggacagaaacagtca

SEQ ID NO: 6094122 - DNA, 25 bp, Homo sapien
ggagggcttacactttctgatttca

SEQ ID NO: 6094123 - DNA, 25 bp, Homo sapien
caacaaataacgctgggacatctgg

SEQ ID NO: 6094124 - DNA, 25 bp, Homo sapien
cctgacctatgtggagaaaccccgt

SEQ ID NO: 6094125 - DNA, 25 bp, Homo sapien
tccaaggaatagaatagagatccca

SEQ ID NO: 6094126 - DNA, 25 bp, Homo sapien
gatcccagaaataaaccctcacatg

SEQ ID NO: 6094127 - DNA, 25 bp, Homo sapien
agaacaaagtttggccaggtgcggt

SEQ ID NO: 6094128 - DNA, 25 bp, Homo sapien
tgatttcaacaaggatgctaagacc

SEQ ID NO: 6094129 - DNA, 25 bp, Homo sapien
gatatacagattcaaggccatccct

SEQ ID NO: 6094130 - DNA, 25 bp, Homo sapien
gaaatctggaaaacttctggtctca

SEQ ID NO: 6094131 - DNA, 25 bp, Homo sapien
gatactcaacttgtactggaggtct

SEQ ID NO: 6094132 - DNA, 25 bp, Homo sapien
gacttagttcgcatccccaagatat

SEQ ID NO: 6094133 - DNA, 25 bp, Homo sapien
ggagccgtgactgtgccgctgcact

SEQ ID NO: 6094134 - DNA, 25 bp, Homo sapien
tatgcaattattccaagatctgaga

SEQ ID NO: 6094135 - DNA, 25 bp, Homo sapien
taagacacataaatgaatttcacgt

SEQ ID NO: 6094136 - DNA, 25 bp, Homo sapien
aatttcacgttcagacttagttcgc

SEQ ID NO: 6094137 - DNA, 25 bp, Homo sapien
tatgaaacataaatgagaccgggca

SEQ ID NO: 6094138 - DNA, 25 bp, Homo sapien
gccgaagcaagtggatcacttgagc

SEQ ID NO: 6094139 - DNA, 25 bp, Homo sapien
tccgggcaacatgacaagatcctgt

SEQ ID NO: 6094140 - DNA, 25 bp, Homo sapien
tgagctcaggagtttgcgaccactc

SEQ ID NO: 6094141 - DNA, 25 bp, Homo sapien
gagaactgtatgagcccaggaggtc

SEQ ID NO: 6094142 - DNA, 25 bp, Homo sapien
aaaccgagtcaatacaaattagtct

SEQ ID NO: 6094143 - DNA, 25 bp, Homo sapien
taacctttgaagaaacactactagc

SEQ ID NO: 6094144 - DNA, 25 bp, Homo sapien
gatttttctcactacttaaccatac

SEQ ID NO: 6094145 - DNA, 25 bp, Homo sapien
tactagcaaactttagacaacaatt

SEQ ID NO: 6094146 - DNA, 25 bp, Homo sapien
tctcactacttaaccatacctggaa

SEQ ID NO: 6094147 - DNA, 25 bp, Homo sapien
tacatccattctgggtattaccaca

SEQ ID NO: 6094148 - DNA, 25 bp, Homo sapien
tttaagtctacaccaggtcatgctg

SEQ ID NO: 6094149 - DNA, 25 bp, Homo sapien
catacctggaataacctttgaagaa

SEQ ID NO: 6094150 - DNA, 25 bp, Homo sapien
gaaacactactagcaaactttagac

SEQ ID NO: 6094151 - DNA, 25 bp, Homo sapien
aaccagattgttggcagaggacaca

SEQ ID NO: 6094152 - DNA, 25 bp, Homo sapien
tacaattactagaatccttgatatt

SEQ ID NO: 6094153 - DNA, 25 bp, Homo sapien
taaaaccagattgttggcagaggac

SEQ ID NO: 6094154 - DNA, 25 bp, Homo sapien
ccatggagctactcttctgtaacat

SEQ ID NO: 6094155 - DNA, 25 bp, Homo sapien
tgtggcctgtgtggatccctgagtc

SEQ ID NO: 6094156 - DNA, 25 bp, Homo sapien
aaagtgttttgcagctaatccaaac

SEQ ID NO: 6094157 - DNA, 25 bp, Homo sapien
gttttgcagctaatccaaaccatgg

SEQ ID NO: 6094158 - DNA, 25 bp, Homo sapien
tgtatcatcataggcaccgttgagg

SEQ ID NO: 6094159 - DNA, 25 bp, Homo sapien
agaatggggcaaaacggagctgcat

SEQ ID NO: 6094160 - DNA, 25 bp, Homo sapien
tattgtatcatcataggcaccgttg

SEQ ID NO: 6094161 - DNA, 25 bp, Homo sapien
taggcaccgttgaggtcatagcctg

SEQ ID NO: 6094162 - DNA, 25 bp, Homo sapien
tcatcataggcaccgttgaggtcat

SEQ ID NO: 6094163 - DNA, 25 bp, Homo sapien
tgcagctaatccaaaccatggagct

SEQ ID NO: 6094164 - DNA, 25 bp, Homo sapien
aaaccatggagctactcttctgtaa

SEQ ID NO: 6094165 - DNA, 25 bp, Homo sapien
tagcctgtggcctgtgtggatccct

SEQ ID NO: 6094166 - DNA, 25 bp, Homo sapien
aaactcatgttcgaacaactctgca

SEQ ID NO: 6094167 - DNA, 25 bp, Homo sapien
gtgtccattttagtagtgcaaacta

SEQ ID NO: 6094168 - DNA, 25 bp, Homo sapien
tgaaactcatgttcgaacaactctg

SEQ ID NO: 6094169 - DNA, 25 bp, Homo sapien
ttttaagtgtccattttagtagtgc

SEQ ID NO: 6094170 - DNA, 25 bp, Homo sapien
actgaaactgaaactcatgttcgaa

SEQ ID NO: 6094171 - DNA, 25 bp, Homo sapien
gaaactgaaactcatgttcgaacaa

SEQ ID NO: 6094172 - DNA, 25 bp, Homo sapien
tcctcagtaatcttcatctatcaat

SEQ ID NO: 6094173 - DNA, 25 bp, Homo sapien
tatattgacattgttgtacaacaga

SEQ ID NO: 6094174 - DNA, 25 bp, Homo sapien
cctgtttgctgtgggtaacggtggg

SEQ ID NO: 6094175 - DNA, 25 bp, Homo sapien
tcagtaatcttcatctatcaataaa

SEQ ID NO: 6094176 - DNA, 25 bp, Homo sapien
gcagagtgaaaatgcgagcagagga

SEQ ID NO: 6094177 - DNA, 25 bp, Homo sapien
gtagtgcaaactatattgacattgt

SEQ ID NO: 6094178 - DNA, 25 bp, Homo sapien
cctccgcctctcagattcaagtgat

SEQ ID NO: 6094179 - DNA, 25 bp, Homo sapien
ctcaaattgccttttaggacagggc

SEQ ID NO: 6094180 - DNA, 25 bp, Homo sapien
tgtgagtcattgtgcctggcctgaa

SEQ ID NO: 6094181 - DNA, 25 bp, Homo sapien
tcatcgcggtcgaaatagaagccca

SEQ ID NO: 6094182 - DNA, 25 bp, Homo sapien
tcctcggccaattcgcggaagaagt

SEQ ID NO: 6094183 - DNA, 25 bp, Homo sapien
gcctgaagtctgtgcttttaaccct

SEQ ID NO: 6094184 - DNA, 25 bp, Homo sapien
catcctcccagtgttgggattgcag

SEQ ID NO: 6094185 - DNA, 25 bp, Homo sapien
acagggcaagtttctattgggcagc

SEQ ID NO: 6094186 - DNA, 25 bp, Homo sapien
taggaggcctgcaggtacaaattgg

SEQ ID NO: 6094187 - DNA, 25 bp, Homo sapien
tgattttcctgcctcatcctctcga

SEQ ID NO: 6094188 - DNA, 25 bp, Homo sapien
aagtgtgagtcaccatgcccagctg

SEQ ID NO: 6094189 - DNA, 25 bp, Homo sapien
caggtacaaattggccaggctggtc

SEQ ID NO: 6094190 - DNA, 25 bp, Homo sapien
actcacatcagtccctcaaacgaag

SEQ ID NO: 6094191 - DNA, 25 bp, Homo sapien
taaaagccagaacataacaaatctc

SEQ ID NO: 6094192 - DNA, 25 bp, Homo sapien
caggaaggtctgagtgaacttcttc

SEQ ID NO: 6094193 - DNA, 25 bp, Homo sapien
gaagtaagtttctcggtgccaccag

SEQ ID NO: 6094194 - DNA, 25 bp, Homo sapien
gaaggtttcgccagatttccctcca

SEQ ID NO: 6094195 - DNA, 25 bp, Homo sapien
caccagtgaggtggacatacactca

SEQ ID NO: 6094196 - DNA, 25 bp, Homo sapien
gaagtgcacttaatacaaggaagta

SEQ ID NO: 6094197 - DNA, 25 bp, Homo sapien
tggaaagtcatcttattagaaatac

SEQ ID NO: 6094198 - DNA, 25 bp, Homo sapien
aagtttctcggtgccaccagtgagg

SEQ ID NO: 6094199 - DNA, 25 bp, Homo sapien
tacaagaagtgcacttaatacaagg

SEQ ID NO: 6094200 - DNA, 25 bp, Homo sapien
tgaacaagctgaccttaacttttgg

SEQ ID NO: 6094201 - DNA, 25 bp, Homo sapien
tcagtccctcaaacgaaggtttcgc

SEQ ID NO: 6094202 - DNA, 25 bp, Homo sapien
tcctcccgagaaatcggcagactag

SEQ ID NO: 6094203 - DNA, 25 bp, Homo sapien
cctcccgagaaatcggcagactagg

SEQ ID NO: 6094204 - DNA, 25 bp, Homo sapien
ccgagaaatcggcagactaggatgg

SEQ ID NO: 6094205 - DNA, 25 bp, Homo sapien
ctcccgagaaatcggcagactagga

SEQ ID NO: 6094206 - DNA, 25 bp, Homo sapien
tcccgagaaatcggcagactaggat

SEQ ID NO: 6094207 - DNA, 25 bp, Homo sapien
cccgagaaatcggcagactaggatg

SEQ ID NO: 6094208 - DNA, 25 bp, Homo sapien
gtcctcccgagaaatcggcagacta

SEQ ID NO: 6094209 - DNA, 25 bp, Homo sapien
gctccagagtctgacccctggtggg

SEQ ID NO: 6094210 - DNA, 25 bp, Homo sapien
ggtgtggtacattcagagactgagc

SEQ ID NO: 6094211 - DNA, 25 bp, Homo sapien
gggttgttgactttgccgccaggtc

SEQ ID NO: 6094212 - DNA, 25 bp, Homo sapien
cgagattttacgattattaactaag

SEQ ID NO: 6094213 - DNA, 25 bp, Homo sapien
gagacttacgcagcatctactctgt

SEQ ID NO: 6094214 - DNA, 25 bp, Homo sapien
actttgtttagagacttacgcagca

SEQ ID NO: 6094215 - DNA, 25 bp, Homo sapien
tgttatattttcacttccctctgag

SEQ ID NO: 6094216 - DNA, 25 bp, Homo sapien
gccaagttgcttgatcctttttaaa

SEQ ID NO: 6094217 - DNA, 25 bp, Homo sapien
tcatgtgataaaacgtctcccccag

SEQ ID NO: 6094218 - DNA, 25 bp, Homo sapien
ctggtgggtgcttaatacttatcat

SEQ ID NO: 6094219 - DNA, 25 bp, Homo sapien
cctcatctaattactctggttcaag

SEQ ID NO: 6094220 - DNA, 25 bp, Homo sapien
aaagatagtttagacaccttctgcc

SEQ ID NO: 6094221 - DNA, 25 bp, Homo sapien
atctcccacgttgtccggtatttcg

SEQ ID NO: 6094222 - DNA, 25 bp, Homo sapien
cagcagcgctcaccgggacagtgct

SEQ ID NO: 6094223 - DNA, 25 bp, Homo sapien
gccagcagcgctcaccgggacagtg

SEQ ID NO: 6094224 - DNA, 25 bp, Homo sapien
attagccgagccagcagcgctcacc

SEQ ID NO: 6094225 - DNA, 25 bp, Homo sapien
agccaatctcccacgttgtccggta

SEQ ID NO: 6094226 - DNA, 25 bp, Homo sapien
caatctcccacgttgtccggtattt

SEQ ID NO: 6094227 - DNA, 25 bp, Homo sapien
aaagagtcccaaatttagtatcaag

SEQ ID NO: 6094228 - DNA, 25 bp, Homo sapien
aagcggtagacgccccgaagccaat

SEQ ID NO: 6094229 - DNA, 25 bp, Homo sapien
gccaatctcccacgttgtccggtat

SEQ ID NO: 6094230 - DNA, 25 bp, Homo sapien
gagccagcagcgctcaccgggacag

SEQ ID NO: 6094231 - DNA, 25 bp, Homo sapien
ttttttggaagattcgggttcagca

SEQ ID NO: 6094232 - DNA, 25 bp, Homo sapien
gcggtagacgccccgaagccaatct

SEQ ID NO: 6094233 - DNA, 25 bp, Homo sapien
aatatcagcgcgcccagccattcgg

SEQ ID NO: 6094234 - DNA, 25 bp, Homo sapien
atatcagcgcgcccagccattcggg

SEQ ID NO: 6094235 - DNA, 25 bp, Homo sapien
tatcagcgcgcccagccattcgggg

SEQ ID NO: 6094236 - DNA, 25 bp, Homo sapien
aaatatcagcgcgcccagccattcg

SEQ ID NO: 6094237 - DNA, 25 bp, Homo sapien
tgaccttatcagtcatttggacgac

SEQ ID NO: 6094238 - DNA, 25 bp, Homo sapien
tgcttgaccttatcagtcatttgga

SEQ ID NO: 6094239 - DNA, 25 bp, Homo sapien
gcgcccgcccgaaatagtgaaagtc

SEQ ID NO: 6094240 - DNA, 25 bp, Homo sapien
tatcagtcatttggacgactcaccc

SEQ ID NO: 6094241 - DNA, 25 bp, Homo sapien
tcagtcatttggacgactcaccctc

SEQ ID NO: 6094242 - DNA, 25 bp, Homo sapien
cttatcagtcatttggacgactcac

SEQ ID NO: 6094243 - DNA, 25 bp, Homo sapien
ccgcgcccgcccgaaatagtgaaag

SEQ ID NO: 6094244 - DNA, 25 bp, Homo sapien
catttggacgactcaccctccttat

SEQ ID NO: 6094245 - DNA, 25 bp, Homo sapien
cgcgcccgcccgaaatagtgaaagt

SEQ ID NO: 6094246 - DNA, 25 bp, Homo sapien
cttgaccttatcagtcatttggacg

SEQ ID NO: 6094247 - DNA, 25 bp, Homo sapien
tgacttgcttgaccttatcagtcat

SEQ ID NO: 6094248 - DNA, 25 bp, Homo sapien
gtcatttggacgactcaccctcctt

SEQ ID NO: 6094249 - DNA, 25 bp, Homo sapien
cgttgccggctcgaagacttgggtt

SEQ ID NO: 6094250 - DNA, 25 bp, Homo sapien
gctcgaagacttgggtttatatccc

SEQ ID NO: 6094251 - DNA, 25 bp, Homo sapien
tatttgatgaccaaatagtgtccgt

SEQ ID NO: 6094252 - DNA, 25 bp, Homo sapien
cagatgtttgcaaatcagaactggg

SEQ ID NO: 6094253 - DNA, 25 bp, Homo sapien
tagcatgctactctgttcttgtaaa

SEQ ID NO: 6094254 - DNA, 25 bp, Homo sapien
ggttggtactgcagaaatatttccc

SEQ ID NO: 6094255 - DNA, 25 bp, Homo sapien
actacgggctcctgccaccagtttt

SEQ ID NO: 6094256 - DNA, 25 bp, Homo sapien
tctttgtgtaaagggcagcctgtca

SEQ ID NO: 6094257 - DNA, 25 bp, Homo sapien
gaagccatcagtaagagtaattttg

SEQ ID NO: 6094258 - DNA, 25 bp, Homo sapien
aaacattccgctttctgaggtagac

SEQ ID NO: 6094259 - DNA, 25 bp, Homo sapien
gatggagtctcccaatgttgcccag

SEQ ID NO: 6094260 - DNA, 25 bp, Homo sapien
gataggcatgaaccaccattcccag

SEQ ID NO: 6094261 - DNA, 25 bp, Homo sapien
gtaaatacctagtggtctcaccaga

SEQ ID NO: 6094262 - DNA, 25 bp, Homo sapien
gcagcctgtcaggaaatagcatgct

SEQ ID NO: 6094263 - DNA, 25 bp, Homo sapien
gatatcacgagtgtacttggtagag

SEQ ID NO: 6094264 - DNA, 25 bp, Homo sapien
ggccactaaggagatgaggagctct

SEQ ID NO: 6094265 - DNA, 25 bp, Homo sapien
ggtgggacacttccagcaacagtaa

SEQ ID NO: 6094266 - DNA, 25 bp, Homo sapien
aagagtgaggccactaaggagatga

SEQ ID NO: 6094267 - DNA, 25 bp, Homo sapien
catgaagagtgaggccactaaggag

SEQ ID NO: 6094268 - DNA, 25 bp, Homo sapien
ggccaaaagcaccacggtcagatgg

SEQ ID NO: 6094269 - DNA, 25 bp, Homo sapien
tcacacgtagatgccaacccagagc

SEQ ID NO: 6094270 - DNA, 25 bp, Homo sapien
tctttatagatatcacgagtgtact

SEQ ID NO: 6094271 - DNA, 25 bp, Homo sapien
tatagatatcacgagtgtacttggt

SEQ ID NO: 6094272 - DNA, 25 bp, Homo sapien
gccaaaagcaccacggtcagatggg

SEQ ID NO: 6094273 - DNA, 25 bp, Homo sapien
aggccactaaggagatgaggagctc

SEQ ID NO: 6094274 - DNA, 25 bp, Homo sapien
tatcacgagtgtacttggtagaggt

SEQ ID NO: 6094275 - DNA, 25 bp, Homo sapien
ggctgtccagctcaccggaatcaga

SEQ ID NO: 6094276 - DNA, 25 bp, Homo sapien
tcgttagagcctgtgcactggacct

SEQ ID NO: 6094277 - DNA, 25 bp, Homo sapien
cagggcgatcaaggagagagcaaca

SEQ ID NO: 6094278 - DNA, 25 bp, Homo sapien
agctctcgtttctgacctatgtgga

SEQ ID NO: 6094279 - DNA, 25 bp, Homo sapien
gaatcagaacgaagatgcccgtcag

SEQ ID NO: 6094280 - DNA, 25 bp, Homo sapien
gaagggttgtggcaagagtccccac

SEQ ID NO: 6094281 - DNA, 25 bp, Homo sapien
tatgctttggccctctcgttagagc

SEQ ID NO: 6094282 - DNA, 25 bp, Homo sapien
aacttgcattgcaaccggaccctgg

SEQ ID NO: 6094283 - DNA, 25 bp, Homo sapien
tggacctgcttcatgccacagatgc

SEQ ID NO: 6094284 - DNA, 25 bp, Homo sapien
cggaccctggcttgtcggatgcaat

SEQ ID NO: 6094285 - DNA, 25 bp, Homo sapien
tccaatgaagaggacagcagcgctt

SEQ ID NO: 6094286 - DNA, 25 bp, Homo sapien
ttgcccagccaaggaaaagtgctgc

SEQ ID NO: 6094287 - DNA, 25 bp, Homo sapien
gcgtgggcgccctgccagactgtcc

SEQ ID NO: 6094288 - DNA, 25 bp, Homo sapien
tccggtgatggcagtccgctttcgt

SEQ ID NO: 6094289 - DNA, 25 bp, Homo sapien
agtccgctttcgtctgcctttttgc

SEQ ID NO: 6094290 - DNA, 25 bp, Homo sapien
gaaaggagtatcattcgccttcccg

SEQ ID NO: 6094291 - DNA, 25 bp, Homo sapien
tgactcggggtcgaaaggagtatca

SEQ ID NO: 6094292 - DNA, 25 bp, Homo sapien
gggagggtgtcgtccaaagctgtca

SEQ ID NO: 6094293 - DNA, 25 bp, Homo sapien
gctttcgtctgcctttttgcgggtc

SEQ ID NO: 6094294 - DNA, 25 bp, Homo sapien
aggagtatcattcgccttcccggtc

SEQ ID NO: 6094295 - DNA, 25 bp, Homo sapien
ggtgatggcagtccgctttcgtctg

SEQ ID NO: 6094296 - DNA, 25 bp, Homo sapien
agggtgtcgtccaaagctgtcagga

SEQ ID NO: 6094297 - DNA, 25 bp, Homo sapien
gggtcgaaaggagtatcattcgcct

SEQ ID NO: 6094298 - DNA, 25 bp, Homo sapien
ccggtgctgcctcaactggcatgat

SEQ ID NO: 6094299 - DNA, 25 bp, Homo sapien
ttggggctgtaactggtcagagggc

SEQ ID NO: 6094300 - DNA, 25 bp, Homo sapien
tagactcttggtagatggaacttgg

SEQ ID NO: 6094301 - DNA, 25 bp, Homo sapien
ctcttggtagatggaacttggaaga

SEQ ID NO: 6094302 - DNA, 25 bp, Homo sapien
gaatagactcttggtagatggaact

SEQ ID NO: 6094303 - DNA, 25 bp, Homo sapien
gaaatacatgcccatcgttgtacca

SEQ ID NO: 6094304 - DNA, 25 bp, Homo sapien
atagactcttggtagatggaacttg

SEQ ID NO: 6094305 - DNA, 25 bp, Homo sapien
ttgaatagactcttggtagatggaa

SEQ ID NO: 6094306 - DNA, 25 bp, Homo sapien
aatagactcttggtagatggaactt

SEQ ID NO: 6094307 - DNA, 25 bp, Homo sapien
aagactgtggaaaagacctgaacat

SEQ ID NO: 6094308 - DNA, 25 bp, Homo sapien
tgaatagactcttggtagatggaac

SEQ ID NO: 6094309 - DNA, 25 bp, Homo sapien
agcaaaggcataatgtcacagtaga

SEQ ID NO: 6094310 - DNA, 25 bp, Homo sapien
tcttggtagatggaacttggaagac

SEQ ID NO: 6094311 - DNA, 25 bp, Homo sapien
cagatacccatagctggctgagcca

SEQ ID NO: 6094312 - DNA, 25 bp, Homo sapien
cacgatgatgcttagtgggactgca

SEQ ID NO: 6094313 - DNA, 25 bp, Homo sapien
tggctgagccatagaagaggaacac

SEQ ID NO: 6094314 - DNA, 25 bp, Homo sapien
tgaggcagtaggagatcacgatgat

SEQ ID NO: 6094315 - DNA, 25 bp, Homo sapien
tgggagaggcacgtattgaacgcct

SEQ ID NO: 6094316 - DNA, 25 bp, Homo sapien
cagtttgatcatggcaggcacctcg

SEQ ID NO: 6094317 - DNA, 25 bp, Homo sapien
gaaggtgcagacaccattgagcaca

SEQ ID NO: 6094318 - DNA, 25 bp, Homo sapien
tcacttccatgttccgcagcgtgta

SEQ ID NO: 6094319 - DNA, 25 bp, Homo sapien
gtgtgaccaacgagtagaacaggga

SEQ ID NO: 6094320 - DNA, 25 bp, Homo sapien
gattcaccatgggtgtgaccaacga

SEQ ID NO: 6094321 - DNA, 25 bp, Homo sapien
gttcttggccggaagcagataccca

SEQ ID NO: 6094322 - DNA, 25 bp, Homo sapien
tgactggatcacagagttgcccaag

SEQ ID NO: 6094323 - DNA, 25 bp, Homo sapien
gcacgccccacatgcttcggagaaa

SEQ ID NO: 6094324 - DNA, 25 bp, Homo sapien
cccacatgcttcggagaaacgccat

SEQ ID NO: 6094325 - DNA, 25 bp, Homo sapien
ccggtgcacagctctgctccagacc

SEQ ID NO: 6094326 - DNA, 25 bp, Homo sapien
cagtcagcacgccccacatgcttcg

SEQ ID NO: 6094327 - DNA, 25 bp, Homo sapien
tccagaccttcccagggcagtcagc

SEQ ID NO: 6094328 - DNA, 25 bp, Homo sapien
cacagctctgctccagaccttccca

SEQ ID NO: 6094329 - DNA, 25 bp, Homo sapien
ccagggcagtcagcacgccccacat

SEQ ID NO: 6094330 - DNA, 25 bp, Homo sapien
tctgctccagaccttcccagggcag

SEQ ID NO: 6094331 - DNA, 25 bp, Homo sapien
acagccggtgcacagctctgctcca

SEQ ID NO: 6094332 - DNA, 25 bp, Homo sapien
accttcccagggcagtcagcacgcc

SEQ ID NO: 6094333 - DNA, 25 bp, Homo sapien
cagctggagagacaattttcagtgc

SEQ ID NO: 6094334 - DNA, 25 bp, Homo sapien
tatcccaacataactccatgaagtg

SEQ ID NO: 6094335 - DNA, 25 bp, Homo sapien
ctgtgcagtaaactgcgccttctgc

SEQ ID NO: 6094336 - DNA, 25 bp, Homo sapien
gtgcagtaaactgcgccttctgctg

SEQ ID NO: 6094337 - DNA, 25 bp, Homo sapien
ggcaaaccgactggtgatggcaaga

SEQ ID NO: 6094338 - DNA, 25 bp, Homo sapien
tctgggcaaaccgactggtgatggc

SEQ ID NO: 6094339 - DNA, 25 bp, Homo sapien
aaaccgactggtgatggcaagagtg

SEQ ID NO: 6094340 - DNA, 25 bp, Homo sapien
acatttatcccaacataactccatg

SEQ ID NO: 6094341 - DNA, 25 bp, Homo sapien
tgtgcagtaaactgcgccttctgct

SEQ ID NO: 6094342 - DNA, 25 bp, Homo sapien
tttatcccaacataactccatgaag

SEQ ID NO: 6094343 - DNA, 25 bp, Homo sapien
aatctgggcaaaccgactggtgatg

SEQ ID NO: 6094344 - DNA, 25 bp, Homo sapien
caaaccgactggtgatggcaagagt

SEQ ID NO: 6094345 - DNA, 25 bp, Homo sapien
atgaaggaacaactaaaccaatagc

SEQ ID NO: 6094346 - DNA, 25 bp, Homo sapien
ttgatcttcgttgtattggaatgat

SEQ ID NO: 6094347 - DNA, 25 bp, Homo sapien
tcatttcggcattaacttcttcaac

SEQ ID NO: 6094348 - DNA, 25 bp, Homo sapien
aagcagcagctctagctcttcttaa

SEQ ID NO: 6094349 - DNA, 25 bp, Homo sapien
gtcaacaaatgaccctgtaataact

SEQ ID NO: 6094350 - DNA, 25 bp, Homo sapien
ttcaacagataagtcaacaaatgac

SEQ ID NO: 6094351 - DNA, 25 bp, Homo sapien
gctgtataagcgtgaactgtagtca

SEQ ID NO: 6094352 - DNA, 25 bp, Homo sapien
acatattgagcaacaaatgaagatt

SEQ ID NO: 6094353 - DNA, 25 bp, Homo sapien
tgtattgttaacaatatctgaagaa

SEQ ID NO: 6094354 - DNA, 25 bp, Homo sapien
caatagcttttgctgcccctgttga

SEQ ID NO: 6094355 - DNA, 25 bp, Homo sapien
tctaatagcaattccgtctaatttt

SEQ ID NO: 6094356 - DNA, 25 bp, Homo sapien
tctttttccatttacatctataaat

SEQ ID NO: 6094357 - DNA, 25 bp, Homo sapien
ctgcccctgttgaagaaggaacaat

SEQ ID NO: 6094358 - DNA, 25 bp, Homo sapien
tggaactctaatagcaattccgtct

SEQ ID NO: 6094359 - DNA, 25 bp, Homo sapien
ttttaattcaacagataagtcaaca

SEQ ID NO: 6094360 - DNA, 25 bp, Homo sapien
aaatgaccctgtaataactggaact

SEQ ID NO: 6094361 - DNA, 25 bp, Homo sapien
tccagttaatgaaggaacaactaaa

SEQ ID NO: 6094362 - DNA, 25 bp, Homo sapien
taagcgtgaactgtagtcataaatc

SEQ ID NO: 6094363 - DNA, 25 bp, Homo sapien
taattttccagttaatgaaggaaca

SEQ ID NO: 6094364 - DNA, 25 bp, Homo sapien
tgaactgtagtcataaatccgtggc

SEQ ID NO: 6094365 - DNA, 25 bp, Homo sapien
tagctcttcttaaatctttgtgtgg

SEQ ID NO: 6094366 - DNA, 25 bp, Homo sapien
agataagtcaacaaatgaccctgta

SEQ ID NO: 6094367 - DNA, 25 bp, Homo sapien
accatgtgtattgttaacaatatct

SEQ ID NO: 6094368 - DNA, 25 bp, Homo sapien
aatatctgaagaaacaacttgatct

SEQ ID NO: 6094369 - DNA, 25 bp, Homo sapien
atttgattttaattcaacagataag

SEQ ID NO: 6094370 - DNA, 25 bp, Homo sapien
ttcgttgtattggaatgattcattt

SEQ ID NO: 6094371 - DNA, 25 bp, Homo sapien
gcttggatttgattttaattcaaca

SEQ ID NO: 6094372 - DNA, 25 bp, Homo sapien
tcatatcaagcatagagtttgtata

SEQ ID NO: 6094373 - DNA, 25 bp, Homo sapien
tccgtctaattttccagttaatgaa

SEQ ID NO: 6094374 - DNA, 25 bp, Homo sapien
cggcattaacttcttcaacgcttgg

SEQ ID NO: 6094375 - DNA, 25 bp, Homo sapien
taacttcttcaacgcttggatttga

SEQ ID NO: 6094376 - DNA, 25 bp, Homo sapien
gtgaatcttgtagtctttgatcagc

SEQ ID NO: 6094377 - DNA, 25 bp, Homo sapien
gaagattcattgtcatatcaagcat

SEQ ID NO: 6094378 - DNA, 25 bp, Homo sapien
gtagtcataaatccgtggctaattc

SEQ ID NO: 6094379 - DNA, 25 bp, Homo sapien
ttcattttgaactcttttcatttcg

SEQ ID NO: 6094380 - DNA, 25 bp, Homo sapien
tttgaactcttttcatttcggcatt

SEQ ID NO: 6094381 - DNA, 25 bp, Homo sapien
cttttgctgcccctgttgaagaagg

SEQ ID NO: 6094382 - DNA, 25 bp, Homo sapien
gaatgattcattttgaactcttttc

SEQ ID NO: 6094383 - DNA, 25 bp, Homo sapien
aatggaaccatgtgtattgttaaca

SEQ ID NO: 6094384 - DNA, 25 bp, Homo sapien
tgttgcatcaaaaatggaaccatgt

SEQ ID NO: 6094385 - DNA, 25 bp, Homo sapien
tatctaaaaagtgtactaatggtgc

SEQ ID NO: 6094386 - DNA, 25 bp, Homo sapien
gtattggaatgattcattttgaact

SEQ ID NO: 6094387 - DNA, 25 bp, Homo sapien
gttaacaatatctgaagaaacaact

SEQ ID NO: 6094388 - DNA, 25 bp, Homo sapien
aataactggaactctaatagcaatt

SEQ ID NO: 6094389 - DNA, 25 bp, Homo sapien
gaacaatattataagcagcagctct

SEQ ID NO: 6094390 - DNA, 25 bp, Homo sapien
ccatttacatctataaatttagtta

SEQ ID NO: 6094391 - DNA, 25 bp, Homo sapien
caagcatagagtttgtataatcttt

SEQ ID NO: 6094392 - DNA, 25 bp, Homo sapien
ttcaacgcttggatttgattttaat

SEQ ID NO: 6094393 - DNA, 25 bp, Homo sapien
cagctctagctcttcttaaatcttt

SEQ ID NO: 6094394 - DNA, 25 bp, Homo sapien
cttgtagtctttgatcagctgtata

SEQ ID NO: 6094395 - DNA, 25 bp, Homo sapien
ttcttaaatctttgtgtggtgaatc

SEQ ID NO: 6094396 - DNA, 25 bp, Homo sapien
aaatttagttaatgttgcatcaaaa

SEQ ID NO: 6094397 - DNA, 25 bp, Homo sapien
catctataaatttagttaatgttgc

SEQ ID NO: 6094398 - DNA, 25 bp, Homo sapien
agttaatgttgcatcaaaaatggaa

SEQ ID NO: 6094399 - DNA, 25 bp, Homo sapien
agagtttgtataatctttttccatt

SEQ ID NO: 6094400 - DNA, 25 bp, Homo sapien
ctgttgaagaaggaacaatattata

SEQ ID NO: 6094401 - DNA, 25 bp, Homo sapien
tgaagaaacaacttgatcttcgttg

SEQ ID NO: 6094402 - DNA, 25 bp, Homo sapien
aacaacttgatcttcgttgtattgg

SEQ ID NO: 6094403 - DNA, 25 bp, Homo sapien
aatctttgtgtggtgaatcttgtag

SEQ ID NO: 6094404 - DNA, 25 bp, Homo sapien
gtataatctttttccatttacatct

SEQ ID NO: 6094405 - DNA, 25 bp, Homo sapien
ctcttttcatttcggcattaacttc

SEQ ID NO: 6094406 - DNA, 25 bp, Homo sapien
tcattgtcatatcaagcatagagtt

SEQ ID NO: 6094407 - DNA, 25 bp, Homo sapien
gtctttgatcagctgtataagcgtg

SEQ ID NO: 6094408 - DNA, 25 bp, Homo sapien
tattataagcagcagctctagctct

SEQ ID NO: 6094409 - DNA, 25 bp, Homo sapien
tgtgtggtgaatcttgtagtctttg

SEQ ID NO: 6094410 - DNA, 25 bp, Homo sapien
gaacaactaaaccaatagcttttgc

SEQ ID NO: 6094411 - DNA, 25 bp, Homo sapien
atcaaaaatggaaccatgtgtattg

SEQ ID NO: 6094412 - DNA, 25 bp, Homo sapien
tgagcaacaaatgaagattcattgt

SEQ ID NO: 6094413 - DNA, 25 bp, Homo sapien
ataaatccgtggctaattccgaatt

SEQ ID NO: 6094414 - DNA, 25 bp, Homo sapien
tgatcagctgtataagcgtgaactg

SEQ ID NO: 6094415 - DNA, 25 bp, Homo sapien
aagaaggaacaatattataagcagc

SEQ ID NO: 6094416 - DNA, 25 bp, Homo sapien
acaaatgaagattcattgtcatatc

SEQ ID NO: 6094417 - DNA, 25 bp, Homo sapien
ctaaaccaatagcttttgctgcccc

SEQ ID NO: 6094418 - DNA, 25 bp, Homo sapien
ccctgtaataactggaactctaata

SEQ ID NO: 6094419 - DNA, 25 bp, Homo sapien
agcaattccgtctaattttccagtt

SEQ ID NO: 6094420 - DNA, 25 bp, Homo sapien
gcacgggactaatggtgaggacaca

SEQ ID NO: 6094421 - DNA, 25 bp, Homo sapien
gactaaagccgtagccaacagagca

SEQ ID NO: 6094422 - DNA, 25 bp, Homo sapien
gtaatccgcgtcgtcttcaggctgc

SEQ ID NO: 6094423 - DNA, 25 bp, Homo sapien
cagagcagtagtaatccgcgtcgtc

SEQ ID NO: 6094424 - DNA, 25 bp, Homo sapien
gtaccaggacacaccgtagtccctg

SEQ ID NO: 6094425 - DNA, 25 bp, Homo sapien
cctgggaagaccagcagtgcatcca

SEQ ID NO: 6094426 - DNA, 25 bp, Homo sapien
cttcaggctgcacgggactaatggt

SEQ ID NO: 6094427 - DNA, 25 bp, Homo sapien
tggtgatcctcctccgagcggtagt

SEQ ID NO: 6094428 - DNA, 25 bp, Homo sapien
tccttggctgccgagaatcgatcgg

SEQ ID NO: 6094429 - DNA, 25 bp, Homo sapien
gtcagcaggccggtggtgatcctcc

SEQ ID NO: 6094430 - DNA, 25 bp, Homo sapien
gccacttggcctgggaagaccagca

SEQ ID NO: 6094431 - DNA, 25 bp, Homo sapien
tccgagcggtagtagaggagatatc

SEQ ID NO: 6094432 - DNA, 25 bp, Homo sapien
tagccaggtaactcttagaccttat

SEQ ID NO: 6094433 - DNA, 25 bp, Homo sapien
agtaggtcttaactctcatctggca

SEQ ID NO: 6094434 - DNA, 25 bp, Homo sapien
aggtaactcttagaccttattcatc

SEQ ID NO: 6094435 - DNA, 25 bp, Homo sapien
tgtagccaggtaactcttagacctt

SEQ ID NO: 6094436 - DNA, 25 bp, Homo sapien
gccaggtaactcttagaccttattc

SEQ ID NO: 6094437 - DNA, 25 bp, Homo sapien
cacaagtaggtcttaactctcatct

SEQ ID NO: 6094438 - DNA, 25 bp, Homo sapien
tcttctttctgtagccaggtaactc

SEQ ID NO: 6094439 - DNA, 25 bp, Homo sapien
taggtcttaactctcatctggcatc

SEQ ID NO: 6094440 - DNA, 25 bp, Homo sapien
tctgtagccaggtaactcttagacc

SEQ ID NO: 6094441 - DNA, 25 bp, Homo sapien
ttctgtagccaggtaactcttagac

SEQ ID NO: 6094442 - DNA, 25 bp, Homo sapien
tatcacaagtaggtcttaactctca

SEQ ID NO: 6094443 - DNA, 25 bp, Homo sapien
ggtcttaactctcatctggcatctt

SEQ ID NO: 6094444 - DNA, 25 bp, Homo sapien
ttaaaaatatttcttgcaggaggga

SEQ ID NO: 6094445 - DNA, 25 bp, Homo sapien
catgctgtgacagaaacttgaataa

SEQ ID NO: 6094446 - DNA, 25 bp, Homo sapien
cactactgatcaaatgaaggtaact

SEQ ID NO: 6094447 - DNA, 25 bp, Homo sapien
atttcctttcttgctagaacatggc

SEQ ID NO: 6094448 - DNA, 25 bp, Homo sapien
ctaactatttcctttcttgctagaa

SEQ ID NO: 6094449 - DNA, 25 bp, Homo sapien
taaaatcaggataaccctgtcccca

SEQ ID NO: 6094450 - DNA, 25 bp, Homo sapien
ctcttgtaggcaatctcagtaggtc

SEQ ID NO: 6094451 - DNA, 25 bp, Homo sapien
ctctagtttcctgtagaacattaga

SEQ ID NO: 6094452 - DNA, 25 bp, Homo sapien
gctttttgatatagtcaattaattg

SEQ ID NO: 6094453 - DNA, 25 bp, Homo sapien
gcttcagaatttgactacatatatt

SEQ ID NO: 6094454 - DNA, 25 bp, Homo sapien
atgaatgggacccaagaagaacagc

SEQ ID NO: 6094455 - DNA, 25 bp, Homo sapien
gtagctttagcctatcttttctcca

SEQ ID NO: 6094456 - DNA, 25 bp, Homo sapien
taggcaatctcagtaggtcctttat

SEQ ID NO: 6094457 - DNA, 25 bp, Homo sapien
ggagggaatgaataaaatcaggata

SEQ ID NO: 6094458 - DNA, 25 bp, Homo sapien
caggataaccctgtccccatttctt

SEQ ID NO: 6094459 - DNA, 25 bp, Homo sapien
gaaacttgaataattcacatgctgt

SEQ ID NO: 6094460 - DNA, 25 bp, Homo sapien
tacatagtaattacacataattatg

SEQ ID NO: 6094461 - DNA, 25 bp, Homo sapien
acacataattatggcacagtatgac

SEQ ID NO: 6094462 - DNA, 25 bp, Homo sapien
cctctggtagctttagcctatcttt

SEQ ID NO: 6094463 - DNA, 25 bp, Homo sapien
gaacagcatcacacactatgttgaa

SEQ ID NO: 6094464 - DNA, 25 bp, Homo sapien
tgaatcaggtctggactgatctcag

SEQ ID NO: 6094465 - DNA, 25 bp, Homo sapien
atctgtctcaatttttgagggtaga

SEQ ID NO: 6094466 - DNA, 25 bp, Homo sapien
tttcttgctagaacatggctttttg

SEQ ID NO: 6094467 - DNA, 25 bp, Homo sapien
atgacatttcaattatgtataatgc

SEQ ID NO: 6094468 - DNA, 25 bp, Homo sapien
taaacttctattatgaatgggaccc

SEQ ID NO: 6094469 - DNA, 25 bp, Homo sapien
atctcagtaggtcctttataatctg

SEQ ID NO: 6094470 - DNA, 25 bp, Homo sapien
tgttaactctagtttcctgtagaac

SEQ ID NO: 6094471 - DNA, 25 bp, Homo sapien
atatttctgtaacatgctgtgacag

SEQ ID NO: 6094472 - DNA, 25 bp, Homo sapien
atgcaccctctggtagctttagcct

SEQ ID NO: 6094473 - DNA, 25 bp, Homo sapien
cttgcaggagggaatgaataaaatc

SEQ ID NO: 6094474 - DNA, 25 bp, Homo sapien
tgaataattcacatgctgtactatg

SEQ ID NO: 6094475 - DNA, 25 bp, Homo sapien
tgatcaaatgaaggtaactggtatg

SEQ ID NO: 6094476 - DNA, 25 bp, Homo sapien
gtaattacacataattatggcacag

SEQ ID NO: 6094477 - DNA, 25 bp, Homo sapien
ataatgcactactgatcaaatgaag

SEQ ID NO: 6094478 - DNA, 25 bp, Homo sapien
tttcaattatgtataatgcactact

SEQ ID NO: 6094479 - DNA, 25 bp, Homo sapien
gaatttgactacatatattgatgtt

SEQ ID NO: 6094480 - DNA, 25 bp, Homo sapien
catatattgatattttaattgatac

SEQ ID NO: 6094481 - DNA, 25 bp, Homo sapien
attaattgttaactctagtttcctg

SEQ ID NO: 6094482 - DNA, 25 bp, Homo sapien
gcacagtatgacatttcaattatgt

SEQ ID NO: 6094483 - DNA, 25 bp, Homo sapien
aattgatacatagtaattacacata

SEQ ID NO: 6094484 - DNA, 25 bp, Homo sapien
tctattatgaatgggacccaagaag

SEQ ID NO: 6094485 - DNA, 25 bp, Homo sapien
gggacccaagaagaacagcatcaca

SEQ ID NO: 6094486 - DNA, 25 bp, Homo sapien
gtctttctcttgtaggcaatctcag

SEQ ID NO: 6094487 - DNA, 25 bp, Homo sapien
catcacacactatgttgaaaagctt

SEQ ID NO: 6094488 - DNA, 25 bp, Homo sapien
gtcacatcagatctaactatttcct

SEQ ID NO: 6094489 - DNA, 25 bp, Homo sapien
caagaagaacagcatcacacactat

SEQ ID NO: 6094490 - DNA, 25 bp, Homo sapien
attcacatgctgtactatgcttcag

SEQ ID NO: 6094491 - DNA, 25 bp, Homo sapien
tttcctgtagaacattagatgttat

SEQ ID NO: 6094492 - DNA, 25 bp, Homo sapien
tgatatagtcaattaattgttaact

SEQ ID NO: 6094493 - DNA, 25 bp, Homo sapien
gactacatatattgatgttttaaaa

SEQ ID NO: 6094494 - DNA, 25 bp, Homo sapien
atcttttctccatctgtctcaattt

SEQ ID NO: 6094495 - DNA, 25 bp, Homo sapien
gtaggtcctttataatctggagaac

SEQ ID NO: 6094496 - DNA, 25 bp, Homo sapien
ctgtaacatgctgtgacagaaactt

SEQ ID NO: 6094497 - DNA, 25 bp, Homo sapien
gctagaacatggctttttgatatag

SEQ ID NO: 6094498 - DNA, 25 bp, Homo sapien
aatgaataaaatcaggataaccctg

SEQ ID NO: 6094499 - DNA, 25 bp, Homo sapien
acactatgttgaaaagcttgtcttt

SEQ ID NO: 6094500 - DNA, 25 bp, Homo sapien
cattagatgttatttcttcatccaa

SEQ ID NO: 6094501 - DNA, 25 bp, Homo sapien
ctgtccccatttctttttgaacata

SEQ ID NO: 6094502 - DNA, 25 bp, Homo sapien
caatagatcataatatttctgtaac

SEQ ID NO: 6094503 - DNA, 25 bp, Homo sapien
gatattttaattgatacatagtaat

SEQ ID NO: 6094504 - DNA, 25 bp, Homo sapien
tactatgcttcagaatttgactaca

SEQ ID NO: 6094505 - DNA, 25 bp, Homo sapien
agggcttaaacttctattatgaatg

SEQ ID NO: 6094506 - DNA, 25 bp, Homo sapien
atgttatttcttcatccaaatgcac

SEQ ID NO: 6094507 - DNA, 25 bp, Homo sapien
attaggcaatagatcataatatttc

SEQ ID NO: 6094508 - DNA, 25 bp, Homo sapien
gatgttttaaaaatatttcttgcag

SEQ ID NO: 6094509 - DNA, 25 bp, Homo sapien
tgttgaaaagcttgtctttctcttg

SEQ ID NO: 6094510 - DNA, 25 bp, Homo sapien
gtagagggcttaaacttctattatg

SEQ ID NO: 6094511 - DNA, 25 bp, Homo sapien
aatgaaggtaactggtatgtcacat

SEQ ID NO: 6094512 - DNA, 25 bp, Homo sapien
catccaaatgcaccctctggtagct

SEQ ID NO: 6094513 - DNA, 25 bp, Homo sapien
atggacattaggcaatagatcataa

SEQ ID NO: 6094514 - DNA, 25 bp, Homo sapien
gtagaacattagatgttatttcttc

SEQ ID NO: 6094515 - DNA, 25 bp, Homo sapien
tagtcaattaattgttaactctagt

SEQ ID NO: 6094516 - DNA, 25 bp, Homo sapien
tcagatctaactatttcctttcttg

SEQ ID NO: 6094517 - DNA, 25 bp, Homo sapien
ggtaactggtatgtcacatcagatc

SEQ ID NO: 6094518 - DNA, 25 bp, Homo sapien
aaaagcttgtctttctcttgtaggc

SEQ ID NO: 6094519 - DNA, 25 bp, Homo sapien
attatggcacagtatgacatttcaa

SEQ ID NO: 6094520 - DNA, 25 bp, Homo sapien
ccatttctttttgaacatatattga

SEQ ID NO: 6094521 - DNA, 25 bp, Homo sapien
gagaactgaatcaggtctggactga

SEQ ID NO: 6094522 - DNA, 25 bp, Homo sapien
tggtatgtcacatcagatctaacta

SEQ ID NO: 6094523 - DNA, 25 bp, Homo sapien
ctcaatttttgagggtagagggctt

SEQ ID NO: 6094524 - DNA, 25 bp, Homo sapien
tgagggtagagggcttaaacttcta

SEQ ID NO: 6094525 - DNA, 25 bp, Homo sapien
atcataatatttctgtaacatgctg

SEQ ID NO: 6094526 - DNA, 25 bp, Homo sapien
tagcctatcttttctccatctgtct

SEQ ID NO: 6094527 - DNA, 25 bp, Homo sapien
atatttcttgcaggagggaatgaat

SEQ ID NO: 6094528 - DNA, 25 bp, Homo sapien
gtgacagaaacttgaataattcaca

SEQ ID NO: 6094529 - DNA, 25 bp, Homo sapien
tctccatctgtctcaatttttgagg

SEQ ID NO: 6094530 - DNA, 25 bp, Homo sapien
cctttataatctggagaactgaatc

SEQ ID NO: 6094531 - DNA, 25 bp, Homo sapien
taatctggagaactgaatcaggtct

SEQ ID NO: 6094532 - DNA, 25 bp, Homo sapien
tttcttcatccaaatgcaccctctg

SEQ ID NO: 6094533 - DNA, 25 bp, Homo sapien
atgctgtactatgcttcagaatttg

SEQ ID NO: 6094534 - DNA, 25 bp, Homo sapien
aacatggctttttgatatagtcaat

SEQ ID NO: 6094535 - DNA, 25 bp, Homo sapien
ttatgtataatgcactactgatcaa

SEQ ID NO: 6094536 - DNA, 25 bp, Homo sapien
cagagccacacttaaattttacttt

SEQ ID NO: 6094537 - DNA, 25 bp, Homo sapien
gctctggtatgtctcaaattaacct

SEQ ID NO: 6094538 - DNA, 25 bp, Homo sapien
tgtatgtccgacaaagaaaacaata

SEQ ID NO: 6094539 - DNA, 25 bp, Homo sapien
gcagtgtaggtgtatgtccgacaaa

SEQ ID NO: 6094540 - DNA, 25 bp, Homo sapien
tatgtctcaaattaacctagataga

SEQ ID NO: 6094541 - DNA, 25 bp, Homo sapien
gaatgcagtgtaggtgtatgtccga

SEQ ID NO: 6094542 - DNA, 25 bp, Homo sapien
ccagttgcttaagcatacatttgaa

SEQ ID NO: 6094543 - DNA, 25 bp, Homo sapien
tacatttgaaagttatccttggtct

SEQ ID NO: 6094544 - DNA, 25 bp, Homo sapien
tacttacttaacttatgctctggta

SEQ ID NO: 6094545 - DNA, 25 bp, Homo sapien
tcactttccgctggggagagcatag

SEQ ID NO: 6094546 - DNA, 25 bp, Homo sapien
gcacacctcttctggtcactttccg

SEQ ID NO: 6094547 - DNA, 25 bp, Homo sapien
taattcggtagacaaataagtctcc

SEQ ID NO: 6094548 - DNA, 25 bp, Homo sapien
tccagtggcagaaggagtacagaca

SEQ ID NO: 6094549 - DNA, 25 bp, Homo sapien
cacatacaatctgagtgatattagt

SEQ ID NO: 6094550 - DNA, 25 bp, Homo sapien
tattctcacatacaatctgagtgat

SEQ ID NO: 6094551 - DNA, 25 bp, Homo sapien
taaatgtcaacccagtttattattc

SEQ ID NO: 6094552 - DNA, 25 bp, Homo sapien
ctgagtgatattagtcagtaaggcc

SEQ ID NO: 6094553 - DNA, 25 bp, Homo sapien
tctgagtgatattagtcagtaaggc

SEQ ID NO: 6094554 - DNA, 25 bp, Homo sapien
caatctgagtgatattagtcagtaa

SEQ ID NO: 6094555 - DNA, 25 bp, Homo sapien
tgagtgatattagtcagtaaggcca

SEQ ID NO: 6094556 - DNA, 25 bp, Homo sapien
acaatctgagtgatattagtcagta

SEQ ID NO: 6094557 - DNA, 25 bp, Homo sapien
catacaatctgagtgatattagtca

SEQ ID NO: 6094558 - DNA, 25 bp, Homo sapien
ttccagtggcagaaggagtacagac

SEQ ID NO: 6094559 - DNA, 25 bp, Homo sapien
tctcacatacaatctgagtgatatt

SEQ ID NO: 6094560 - DNA, 25 bp, Homo sapien
gaattgtccgatttgctgcggctga

SEQ ID NO: 6094561 - DNA, 25 bp, Homo sapien
tgcccagcaggcgatgaagacgctc

SEQ ID NO: 6094562 - DNA, 25 bp, Homo sapien
gctccgagtcctgaccaaggagtag

SEQ ID NO: 6094563 - DNA, 25 bp, Homo sapien
gaagacgctcaggacgataattacg

SEQ ID NO: 6094564 - DNA, 25 bp, Homo sapien
gacatgatccggatgaaggcccgac

SEQ ID NO: 6094565 - DNA, 25 bp, Homo sapien
gttccagcccatgataggcaggcca

SEQ ID NO: 6094566 - DNA, 25 bp, Homo sapien
ccaggaagtactccgctctgaagag

SEQ ID NO: 6094567 - DNA, 25 bp, Homo sapien
gataattacggtcttgagcagcgcc

SEQ ID NO: 6094568 - DNA, 25 bp, Homo sapien
tcagagctgcggctggccttggaaa

SEQ ID NO: 6094569 - DNA, 25 bp, Homo sapien
aatgttcttgcggaacgtcaggcgg

SEQ ID NO: 6094570 - DNA, 25 bp, Homo sapien
gctgaattccatgccggcgatgatg

SEQ ID NO: 6094571 - DNA, 25 bp, Homo sapien
gatgggtcgcttgaatttgccagca

SEQ ID NO: 6094572 - DNA, 25 bp, Homo sapien
gattccactgtcaaacccaacattg

SEQ ID NO: 6094573 - DNA, 25 bp, Homo sapien
gagggatatactccccttcagaagt

SEQ ID NO: 6094574 - DNA, 25 bp, Homo sapien
gcgtgtccgtactagtgctttctgg

SEQ ID NO: 6094575 - DNA, 25 bp, Homo sapien
gatgtctatttgatccagagggata

SEQ ID NO: 6094576 - DNA, 25 bp, Homo sapien
tgctaagtctctggcactacaaagg

SEQ ID NO: 6094577 - DNA, 25 bp, Homo sapien
caaagtctgcgttgtcaatgtcctg

SEQ ID NO: 6094578 - DNA, 25 bp, Homo sapien
tctttgcttgtgagggcaacttcat

SEQ ID NO: 6094579 - DNA, 25 bp, Homo sapien
tcatttgctagataagagctacggc

SEQ ID NO: 6094580 - DNA, 25 bp, Homo sapien
ggctctagaggtacacttgcctggt

SEQ ID NO: 6094581 - DNA, 25 bp, Homo sapien
cagaaatatacgatcgattccactg

SEQ ID NO: 6094582 - DNA, 25 bp, Homo sapien
taagagctacggcactgtgtcgtca

SEQ ID NO: 6094583 - DNA, 25 bp, Homo sapien
tatgaccacgatttcaaagtctgcg

SEQ ID NO: 6094584 - DNA, 25 bp, Homo sapien
agtggagaaagtcttgtgccggccc

SEQ ID NO: 6094585 - DNA, 25 bp, Homo sapien
cattagcatgttgtaatgcagtggg

SEQ ID NO: 6094586 - DNA, 25 bp, Homo sapien
agaaagtcttgtgccggccctcagc

SEQ ID NO: 6094587 - DNA, 25 bp, Homo sapien
tggagaaagtcttgtgccggccctc

SEQ ID NO: 6094588 - DNA, 25 bp, Homo sapien
cagatggtcacgtagtgatcatagc

SEQ ID NO: 6094589 - DNA, 25 bp, Homo sapien
gggactcattagcatgttgtaatgc

SEQ ID NO: 6094590 - DNA, 25 bp, Homo sapien
ggtcacgtagtgatcatagcccatg

SEQ ID NO: 6094591 - DNA, 25 bp, Homo sapien
cagaaagtgaggtgaaaaaccatca

SEQ ID NO: 6094592 - DNA, 25 bp, Homo sapien
gtcacgtagtgatcatagcccatga

SEQ ID NO: 6094593 - DNA, 25 bp, Homo sapien
gactcattagcatgttgtaatgcag

SEQ ID NO: 6094594 - DNA, 25 bp, Homo sapien
cacggggactcattagcatgttgta

SEQ ID NO: 6094595 - DNA, 25 bp, Homo sapien
gatggtcacgtagtgatcatagccc

SEQ ID NO: 6094596 - DNA, 25 bp, Homo sapien
aagcccgtgcatttgtgtgccccag

SEQ ID NO: 6094597 - DNA, 25 bp, Homo sapien
ctgcaggctacagccctggggcact

SEQ ID NO: 6094598 - DNA, 25 bp, Homo sapien
gccaccagcagtgcacttctaagct

SEQ ID NO: 6094599 - DNA, 25 bp, Homo sapien
ccttcactgaaacaaccctgtggag

SEQ ID NO: 6094600 - DNA, 25 bp, Homo sapien
ccagcagtgcacttctaagctgcag

SEQ ID NO: 6094601 - DNA, 25 bp, Homo sapien
tcactgaaacaaccctgtggaggaa

SEQ ID NO: 6094602 - DNA, 25 bp, Homo sapien
cctgtggaggaacctacacaagccc

SEQ ID NO: 6094603 - DNA, 25 bp, Homo sapien
gtggaggaacctacacaagcccgtg

SEQ ID NO: 6094604 - DNA, 25 bp, Homo sapien
tgtggaggaacctacacaagcccgt

SEQ ID NO: 6094605 - DNA, 25 bp, Homo sapien
tgtagtctccttccttgttcaagtg

SEQ ID NO: 6094606 - DNA, 25 bp, Homo sapien
gaggaacctacacaagcccgtgcat

SEQ ID NO: 6094607 - DNA, 25 bp, Homo sapien
gcagtgcacttctaagctgcaggct

SEQ ID NO: 6094608 - DNA, 25 bp, Homo sapien
gattcgcagccctagttgtcccagg

SEQ ID NO: 6094609 - DNA, 25 bp, Homo sapien
ccctcctctagattcgcagccctag

SEQ ID NO: 6094610 - DNA, 25 bp, Homo sapien
atgtggcaaggcacagaggtagtcc

SEQ ID NO: 6094611 - DNA, 25 bp, Homo sapien
gccccctcctctagattcgcagccc

SEQ ID NO: 6094612 - DNA, 25 bp, Homo sapien
ccccctcctctagattcgcagccct

SEQ ID NO: 6094613 - DNA, 25 bp, Homo sapien
agattcgcagccctagttgtcccag

SEQ ID NO: 6094614 - DNA, 25 bp, Homo sapien
cctcctctagattcgcagccctagt

SEQ ID NO: 6094615 - DNA, 25 bp, Homo sapien
cccctcctctagattcgcagcccta

SEQ ID NO: 6094616 - DNA, 25 bp, Homo sapien
attcgcagccctagttgtcccagga

SEQ ID NO: 6094617 - DNA, 25 bp, Homo sapien
cagaggtagtccctttaggtccctg

SEQ ID NO: 6094618 - DNA, 25 bp, Homo sapien
ccccttttggcagcatcatagttcc

SEQ ID NO: 6094619 - DNA, 25 bp, Homo sapien
gccgatgtaattggcttctctcatg

SEQ ID NO: 6094620 - DNA, 25 bp, Homo sapien
cgatgtaattggcttctctcatgtc

SEQ ID NO: 6094621 - DNA, 25 bp, Homo sapien
gagccgatgtaattggcttctctca

SEQ ID NO: 6094622 - DNA, 25 bp, Homo sapien
aggaacgaaaagaagcttcggctgc

SEQ ID NO: 6094623 - DNA, 25 bp, Homo sapien
tgtctgagccgatgtaattggcttc

SEQ ID NO: 6094624 - DNA, 25 bp, Homo sapien
tgagccgatgtaattggcttctctc

SEQ ID NO: 6094625 - DNA, 25 bp, Homo sapien
tttgtctgagccgatgtaattggct

SEQ ID NO: 6094626 - DNA, 25 bp, Homo sapien
ggaacgaaaagaagcttcggctgct

SEQ ID NO: 6094627 - DNA, 25 bp, Homo sapien
catcaaaagcctcgccaaggaacga

SEQ ID NO: 6094628 - DNA, 25 bp, Homo sapien
gaagtatttgtctgagccgatgtaa

SEQ ID NO: 6094629 - DNA, 25 bp, Homo sapien
tctgagccgatgtaattggcttctc

SEQ ID NO: 6094630 - DNA, 25 bp, Homo sapien
gccgatgtaattggcttctctcatg

SEQ ID NO: 6094631 - DNA, 25 bp, Homo sapien
gagccgatgtaattggcttctctca

SEQ ID NO: 6094632 - DNA, 25 bp, Homo sapien
tgagccgatgtaattggcttctctc

SEQ ID NO: 6094633 - DNA, 25 bp, Homo sapien
ggaacgaaaagaagcttcggctgct

SEQ ID NO: 6094634 - DNA, 25 bp, Homo sapien
ccccttttggcagcatcatagttcc

SEQ ID NO: 6094635 - DNA, 25 bp, Homo sapien
aggaacgaaaagaagcttcggctgc

SEQ ID NO: 6094636 - DNA, 25 bp, Homo sapien
tttgtctgagccgatgtaattggct

SEQ ID NO: 6094637 - DNA, 25 bp, Homo sapien
tgtctgagccgatgtaattggcttc

SEQ ID NO: 6094638 - DNA, 25 bp, Homo sapien
gaagtatttgtctgagccgatgtaa

SEQ ID NO: 6094639 - DNA, 25 bp, Homo sapien
tctgagccgatgtaattggcttctc

SEQ ID NO: 6094640 - DNA, 25 bp, Homo sapien
catcaaaagcctcgccaaggaacga

SEQ ID NO: 6094641 - DNA, 25 bp, Homo sapien
cgatgtaattggcttctctcatgtc

SEQ ID NO: 6094642 - DNA, 25 bp, Homo sapien
gccgatgtaattggcttctctcatg

SEQ ID NO: 6094643 - DNA, 25 bp, Homo sapien
gaagtatttgtctgagccgatgtaa

SEQ ID NO: 6094644 - DNA, 25 bp, Homo sapien
ccccttttggcagcatcatagttcc

SEQ ID NO: 6094645 - DNA, 25 bp, Homo sapien
aggaacgaaaagaagcttcggctgc

SEQ ID NO: 6094646 - DNA, 25 bp, Homo sapien
tgtctgagccgatgtaattggcttc

SEQ ID NO: 6094647 - DNA, 25 bp, Homo sapien
tttgtctgagccgatgtaattggct

SEQ ID NO: 6094648 - DNA, 25 bp, Homo sapien
ggaacgaaaagaagcttcggctgct

SEQ ID NO: 6094649 - DNA, 25 bp, Homo sapien
catcaaaagcctcgccaaggaacga

SEQ ID NO: 6094650 - DNA, 25 bp, Homo sapien
tctgagccgatgtaattggcttctc

SEQ ID NO: 6094651 - DNA, 25 bp, Homo sapien
gagccgatgtaattggcttctctca

SEQ ID NO: 6094652 - DNA, 25 bp, Homo sapien
tgagccgatgtaattggcttctctc

SEQ ID NO: 6094653 - DNA, 25 bp, Homo sapien
cgatgtaattggcttctctcatgtc

SEQ ID NO: 6094654 - DNA, 25 bp, Homo sapien
ggtgggccggtattcctgcagaaca

SEQ ID NO: 6094655 - DNA, 25 bp, Homo sapien
tctggtgggccggtattcctgcaga

SEQ ID NO: 6094656 - DNA, 25 bp, Homo sapien
tgtgtacaagcttctatggggcagc

SEQ ID NO: 6094657 - DNA, 25 bp, Homo sapien
tgggccggtattcctgcagaacata

SEQ ID NO: 6094658 - DNA, 25 bp, Homo sapien
tacaagcttctatggggcagccaga

SEQ ID NO: 6094659 - DNA, 25 bp, Homo sapien
tattcctgcagaacatatgtgtcac

SEQ ID NO: 6094660 - DNA, 25 bp, Homo sapien
ggccggtattcctgcagaacatatg

SEQ ID NO: 6094661 - DNA, 25 bp, Homo sapien
tgcagaacatatgtgtcacagttcc

SEQ ID NO: 6094662 - DNA, 25 bp, Homo sapien
ccggtattcctgcagaacatatgtg

SEQ ID NO: 6094663 - DNA, 25 bp, Homo sapien
tggtgggccggtattcctgcagaac

SEQ ID NO: 6094664 - DNA, 25 bp, Homo sapien
ggtattcctgcagaacatatgtgtc

SEQ ID NO: 6094665 - DNA, 25 bp, Homo sapien
tcctgcagaacatatgtgtcacagt

SEQ ID NO: 6094666 - DNA, 25 bp, Homo sapien
gaactctgttactactgaatttgca

SEQ ID NO: 6094667 - DNA, 25 bp, Homo sapien
ttgcatgaagccagaagtttgagac

SEQ ID NO: 6094668 - DNA, 25 bp, Homo sapien
aggtgcccgtaatcccagctgcttg

SEQ ID NO: 6094669 - DNA, 25 bp, Homo sapien
tgtttaaaaaatgtgactggctggg

SEQ ID NO: 6094670 - DNA, 25 bp, Homo sapien
ggcaggcagatcacaaggtccagag

SEQ ID NO: 6094671 - DNA, 25 bp, Homo sapien
ttatctaaattagccggctgggtga

SEQ ID NO: 6094672 - DNA, 25 bp, Homo sapien
actggctgggtgttgtggctcattt

SEQ ID NO: 6094673 - DNA, 25 bp, Homo sapien
gaatttgcaggtttgacatgtttat

SEQ ID NO: 6094674 - DNA, 25 bp, Homo sapien
gggtaacagagtgagattccatttc

SEQ ID NO: 6094675 - DNA, 25 bp, Homo sapien
catttggaaggattgcatgaagcca

SEQ ID NO: 6094676 - DNA, 25 bp, Homo sapien
cacaaggtccagagatcaagatcaa

SEQ ID NO: 6094677 - DNA, 25 bp, Homo sapien
tgacaaatatggtgaaaccccgcct

SEQ ID NO: 6094678 - DNA, 25 bp, Homo sapien
gatatcacgagtgtacttggtagag

SEQ ID NO: 6094679 - DNA, 25 bp, Homo sapien
tctttatagatatcacgagtgtact

SEQ ID NO: 6094680 - DNA, 25 bp, Homo sapien
gccaaaagcaccacggtcagatggg

SEQ ID NO: 6094681 - DNA, 25 bp, Homo sapien
catgaagagtgaggccactaaggag

SEQ ID NO: 6094682 - DNA, 25 bp, Homo sapien
aggtgggacacttccagcaacagta

SEQ ID NO: 6094683 - DNA, 25 bp, Homo sapien
ggccaaaagcaccacggtcagatgg

SEQ ID NO: 6094684 - DNA, 25 bp, Homo sapien
tatcacgagtgtacttggtagaggt

SEQ ID NO: 6094685 - DNA, 25 bp, Homo sapien
ggtgggacacttccagcaacagtaa

SEQ ID NO: 6094686 - DNA, 25 bp, Homo sapien
aagagtgaggccactaaggagatga

SEQ ID NO: 6094687 - DNA, 25 bp, Homo sapien
ggccactaaggagatgaggagctct

SEQ ID NO: 6094688 - DNA, 25 bp, Homo sapien
tcacacgtagatgccaacccagagc

SEQ ID NO: 6094689 - DNA, 25 bp, Homo sapien
tatagatatcacgagtgtacttggt

SEQ ID NO: 6094690 - DNA, 25 bp, Homo sapien
tcgcaagttattgatggcatgagca

SEQ ID NO: 6094691 - DNA, 25 bp, Homo sapien
tacttcagtgctctgcgaaaccagg

SEQ ID NO: 6094692 - DNA, 25 bp, Homo sapien
gaaacctgccataaacaaggtggtc

SEQ ID NO: 6094693 - DNA, 25 bp, Homo sapien
gattacatgtggagttaaaatagcc

SEQ ID NO: 6094694 - DNA, 25 bp, Homo sapien
ggcatgagcatgttttctggatact

SEQ ID NO: 6094695 - DNA, 25 bp, Homo sapien
cagggaccgaccaacatagaagtag

SEQ ID NO: 6094696 - DNA, 25 bp, Homo sapien
tagccaaaccatgtcaaggcatcaa

SEQ ID NO: 6094697 - DNA, 25 bp, Homo sapien
caccatcatagacccaggagtgaag

SEQ ID NO: 6094698 - DNA, 25 bp, Homo sapien
gcaaccaagatgtcatagccctcta

SEQ ID NO: 6094699 - DNA, 25 bp, Homo sapien
catagcttgttgaacatcactgggc

SEQ ID NO: 6094700 - DNA, 25 bp, Homo sapien
tcactattcctaaagttttggcagc

SEQ ID NO: 6094701 - DNA, 25 bp, Homo sapien
tagccctctattccatctgcatagg

SEQ ID NO: 6094702 - DNA, 25 bp, Homo sapien
tacagtgatcactgcgtcttttagg

SEQ ID NO: 6094703 - DNA, 25 bp, Homo sapien
gggtcactgccgtgtacattacagt

SEQ ID NO: 6094704 - DNA, 25 bp, Homo sapien
tctgtgttacccaaggctatcatga

SEQ ID NO: 6094705 - DNA, 25 bp, Homo sapien
caaaatatagctgtctgtgttaccc

SEQ ID NO: 6094706 - DNA, 25 bp, Homo sapien
aagggcggaaatacgtgcccatgac

SEQ ID NO: 6094707 - DNA, 25 bp, Homo sapien
tataattggtcaaagggcggaaata

SEQ ID NO: 6094708 - DNA, 25 bp, Homo sapien
agagacaaccgtgaggtgggaacca

SEQ ID NO: 6094709 - DNA, 25 bp, Homo sapien
gatcactgcgtcttttaggctataa

SEQ ID NO: 6094710 - DNA, 25 bp, Homo sapien
gaaggccttgagcacgcccttggtg

SEQ ID NO: 6094711 - DNA, 25 bp, Homo sapien
taccataatacaaagagacaaccgt

SEQ ID NO: 6094712 - DNA, 25 bp, Homo sapien
aagactgtggagaagactcgaatat

SEQ ID NO: 6094713 - DNA, 25 bp, Homo sapien
gaagactcgaatataggagacaatg

SEQ ID NO: 6094714 - DNA, 25 bp, Homo sapien
aatgatgtgggtgttggaacatgcc

SEQ ID NO: 6094715 - DNA, 25 bp, Homo sapien
agggttcatcataggtgtcagcaca

SEQ ID NO: 6094716 - DNA, 25 bp, Homo sapien
gatggttctgacaatacgtacatag

SEQ ID NO: 6094717 - DNA, 25 bp, Homo sapien
gaggccatagagaacagacagcccc

SEQ ID NO: 6094718 - DNA, 25 bp, Homo sapien
gcgatcatacgccatcacggccagg

SEQ ID NO: 6094719 - DNA, 25 bp, Homo sapien
gttctgacaatacgtacataggatg

SEQ ID NO: 6094720 - DNA, 25 bp, Homo sapien
aaggatggttctgacaatacgtaca

SEQ ID NO: 6094721 - DNA, 25 bp, Homo sapien
tggttctgacaatacgtacatagga

SEQ ID NO: 6094722 - DNA, 25 bp, Homo sapien
ctgacaatacgtacataggatgtgg

SEQ ID NO: 6094723 - DNA, 25 bp, Homo sapien
caatacgtacataggatgtggtcat

SEQ ID NO: 6094724 - DNA, 25 bp, Homo sapien
gttcatcataggtgtcagcacagca

SEQ ID NO: 6094725 - DNA, 25 bp, Homo sapien
ggaggccatagagaacagacagccc

SEQ ID NO: 6094726 - DNA, 25 bp, Homo sapien
actccagtagtgaccccaacgtggg

SEQ ID NO: 6094727 - DNA, 25 bp, Homo sapien
ctgcgatctctggttctgacctctg

SEQ ID NO: 6094728 - DNA, 25 bp, Homo sapien
ttctcccggtcaaggtcttcaacag

SEQ ID NO: 6094729 - DNA, 25 bp, Homo sapien
cagctgcaggagcagaagtgccacg

SEQ ID NO: 6094730 - DNA, 25 bp, Homo sapien
gacttgtgtgtctcctgctgtgcat

SEQ ID NO: 6094731 - DNA, 25 bp, Homo sapien
aggagcagaagtgccacgccttgtt

SEQ ID NO: 6094732 - DNA, 25 bp, Homo sapien
tccttctcccggtcaaggtcttcaa

SEQ ID NO: 6094733 - DNA, 25 bp, Homo sapien
tcccggtcaaggtcttcaacagtga

SEQ ID NO: 6094734 - DNA, 25 bp, Homo sapien
agaaacggcaggcagaccagaagcc

SEQ ID NO: 6094735 - DNA, 25 bp, Homo sapien
gcagaagtgccacgccttgttcttc

SEQ ID NO: 6094736 - DNA, 25 bp, Homo sapien
cgatctctggttctgacctctgggc

SEQ ID NO: 6094737 - DNA, 25 bp, Homo sapien
ggtcaaggtcttcaacagtgacccg

SEQ ID NO: 6094738 - DNA, 25 bp, Homo sapien
ttttgctagagtagaagcaactctc

SEQ ID NO: 6094739 - DNA, 25 bp, Homo sapien
cttgtaaagatctaagataagtatc

SEQ ID NO: 6094740 - DNA, 25 bp, Homo sapien
ggagactgctaagcccttgtaaaga

SEQ ID NO: 6094741 - DNA, 25 bp, Homo sapien
gagtggtgcggctgttcaaactgtc

SEQ ID NO: 6094742 - DNA, 25 bp, Homo sapien
cagagaggaagatgcacactggaag

SEQ ID NO: 6094743 - DNA, 25 bp, Homo sapien
aaacccagagaggaagatgcacact

SEQ ID NO: 6094744 - DNA, 25 bp, Homo sapien
tggaaatgttctagtccaacttagg

SEQ ID NO: 6094745 - DNA, 25 bp, Homo sapien
caaactgtctgttgtggaagatgga

SEQ ID NO: 6094746 - DNA, 25 bp, Homo sapien
ttgtacgtacgacaggtcaaatgat

SEQ ID NO: 6094747 - DNA, 25 bp, Homo sapien
ccttattttaggagactgctaagcc

SEQ ID NO: 6094748 - DNA, 25 bp, Homo sapien
tttactttgtacgtacgacaggtca

SEQ ID NO: 6094749 - DNA, 25 bp, Homo sapien
agcaactctcttcccttattttagg

SEQ ID NO: 6094750 - DNA, 25 bp, Homo sapien
gcttgtcagcttaataagcttttga

SEQ ID NO: 6094751 - DNA, 25 bp, Homo sapien
gcaaagacgatttgacttcctgtct

SEQ ID NO: 6094752 - DNA, 25 bp, Homo sapien
cttgtcagcttaataagcttttgag

SEQ ID NO: 6094753 - DNA, 25 bp, Homo sapien
gcaaagacgatttgacttcctgtct

SEQ ID NO: 6094754 - DNA, 25 bp, Homo sapien
gcttttgagctgagatgattaggtt

SEQ ID NO: 6094755 - DNA, 25 bp, Homo sapien
gcttgtcagcttaataagcttttga

SEQ ID NO: 6094756 - DNA, 25 bp, Homo sapien
tgaatctttaggtcactttgggtgg

SEQ ID NO: 6094757 - DNA, 25 bp, Homo sapien
gggtggtattgccattttcacgata

SEQ ID NO: 6094758 - DNA, 25 bp, Homo sapien
aacattactgaagttgcttgtcagc

SEQ ID NO: 6094759 - DNA, 25 bp, Homo sapien
tgtcttcctattcgaataccctttg

SEQ ID NO: 6094760 - DNA, 25 bp, Homo sapien
tgcctgattgctgtggccagagttt

SEQ ID NO: 6094761 - DNA, 25 bp, Homo sapien
gctgtggccagagttttcaatacta

SEQ ID NO: 6094762 - DNA, 25 bp, Homo sapien
taggattatgtcatctgcaaagacg

SEQ ID NO: 6094763 - DNA, 25 bp, Homo sapien
tatctgtgagcatggaacgtttttc

SEQ ID NO: 6094764 - DNA, 25 bp, Homo sapien
gcagttgtaaatgggagttcattct

SEQ ID NO: 6094765 - DNA, 25 bp, Homo sapien
gctcagtagcttgcatgtcctaact

SEQ ID NO: 6094766 - DNA, 25 bp, Homo sapien
ttttaatctggaacaactctgctga

SEQ ID NO: 6094767 - DNA, 25 bp, Homo sapien
tgggccctgcgcttggaataatctt

SEQ ID NO: 6094768 - DNA, 25 bp, Homo sapien
taccatgatccacaatttgttcttg

SEQ ID NO: 6094769 - DNA, 25 bp, Homo sapien
tactaaatggtttgcactaactcat

SEQ ID NO: 6094770 - DNA, 25 bp, Homo sapien
ccaagggcagaaccaggtacatttc

SEQ ID NO: 6094771 - DNA, 25 bp, Homo sapien
gctgatagcctgcatataccatgat

SEQ ID NO: 6094772 - DNA, 25 bp, Homo sapien
cagcatgctgttagtggcatgagca

SEQ ID NO: 6094773 - DNA, 25 bp, Homo sapien
tgcatttgcgtagccacaatctctg

SEQ ID NO: 6094774 - DNA, 25 bp, Homo sapien
aacttcttggctgaaatttgcctca

SEQ ID NO: 6094775 - DNA, 25 bp, Homo sapien
tggctataacatttgggccctgcgc

SEQ ID NO: 6094776 - DNA, 25 bp, Homo sapien
cttgaatctgaacagtttggcagca

SEQ ID NO: 6094777 - DNA, 25 bp, Homo sapien
caggccgttgagctggtacaccgtc

SEQ ID NO: 6094778 - DNA, 25 bp, Homo sapien
ttggccagcgagagggccacgttct

SEQ ID NO: 6094779 - DNA, 25 bp, Homo sapien
ggccacgttctcctgagtgttcaga

SEQ ID NO: 6094780 - DNA, 25 bp, Homo sapien
gatgcctttgaagtagccggccagg

SEQ ID NO: 6094781 - DNA, 25 bp, Homo sapien
tctggtagatgacacgcgcctggat

SEQ ID NO: 6094782 - DNA, 25 bp, Homo sapien
tatggagctcgattttccagctggc

SEQ ID NO: 6094783 - DNA, 25 bp, Homo sapien
aaaatgatctacgtgtgaggagagg

SEQ ID NO: 6094784 - DNA, 25 bp, Homo sapien
ttcagaagggtcttacagacgtcca

SEQ ID NO: 6094785 - DNA, 25 bp, Homo sapien
cctcctctgggatctaaggatccag

SEQ ID NO: 6094786 - DNA, 25 bp, Homo sapien
gaaaagctacattctgcccagggag

SEQ ID NO: 6094787 - DNA, 25 bp, Homo sapien
cgcttggtgagaaagtacttgaaga

SEQ ID NO: 6094788 - DNA, 25 bp, Homo sapien
gtacaccgtccggaaggcattggcc

SEQ ID NO: 6094789 - DNA, 25 bp, Homo sapien
aactggaacgtgtaataatgaaggc

SEQ ID NO: 6094790 - DNA, 25 bp, Homo sapien
gctttagcgcctccaaattaaggac

SEQ ID NO: 6094791 - DNA, 25 bp, Homo sapien
cagcgagacaaactggaacgtgtaa

SEQ ID NO: 6094792 - DNA, 25 bp, Homo sapien
caggacctctagctgttctgtaatg

SEQ ID NO: 6094793 - DNA, 25 bp, Homo sapien
tgttgctggtggaaatcgtttttgc

SEQ ID NO: 6094794 - DNA, 25 bp, Homo sapien
catgtagtgagtgggtaatcagagt

SEQ ID NO: 6094795 - DNA, 25 bp, Homo sapien
gctaatcagcgaggagaaaatcgga

SEQ ID NO: 6094796 - DNA, 25 bp, Homo sapien
gttatagcacttcgtccagcactga

SEQ ID NO: 6094797 - DNA, 25 bp, Homo sapien
tcaggtcaaatctcaatacttgcaa

SEQ ID NO: 6094798 - DNA, 25 bp, Homo sapien
tattttcaggacttcatgtagtgag

SEQ ID NO: 6094799 - DNA, 25 bp, Homo sapien
gagggctttctatcagtcatcagtg

SEQ ID NO: 6094800 - DNA, 25 bp, Homo sapien
agcaggcaggaagctaatcagcgag

SEQ ID NO: 6094801 - DNA, 25 bp, Homo sapien
tatcctgtactatactagggtcagc

SEQ ID NO: 6094802 - DNA, 25 bp, Homo sapien
aactacttattacatagcctgaaag

SEQ ID NO: 6094803 - DNA, 25 bp, Homo sapien
cctttaggtgctagaatgcagttcc

SEQ ID NO: 6094804 - DNA, 25 bp, Homo sapien
ctcaaaattatgtcagtagtctaga

SEQ ID NO: 6094805 - DNA, 25 bp, Homo sapien
aatgactacactgacaccacctttg

SEQ ID NO: 6094806 - DNA, 25 bp, Homo sapien
ctaacctgtgaactgtgggagccct

SEQ ID NO: 6094807 - DNA, 25 bp, Homo sapien
gaatgaaagatcaaaacctagaagt

SEQ ID NO: 6094808 - DNA, 25 bp, Homo sapien
aatgcagttcccacggctctccttt

SEQ ID NO: 6094809 - DNA, 25 bp, Homo sapien
attcatctgttgctcatgctcctca

SEQ ID NO: 6094810 - DNA, 25 bp, Homo sapien
tcaaagcaataaagtactgtgcagt

SEQ ID NO: 6094811 - DNA, 25 bp, Homo sapien
gttgccacacctgacattcaaagca

SEQ ID NO: 6094812 - DNA, 25 bp, Homo sapien
ggcaaattaaacacggactcacaca

SEQ ID NO: 6094813 - DNA, 25 bp, Homo sapien
cggccctcaaacacatatcgcacac

SEQ ID NO: 6094814 - DNA, 25 bp, Homo sapien
ggccctcaaacacatatcgcacaca

SEQ ID NO: 6094815 - DNA, 25 bp, Homo sapien
gtccaaacttagtgctatactatac

SEQ ID NO: 6094816 - DNA, 25 bp, Homo sapien
gaatactgttggaggctaagtaaca

SEQ ID NO: 6094817 - DNA, 25 bp, Homo sapien
acagtcactctgattagccagtgcg

SEQ ID NO: 6094818 - DNA, 25 bp, Homo sapien
ccattaccattgcttctcgaatact

SEQ ID NO: 6094819 - DNA, 25 bp, Homo sapien
cttccatgtcgtccacatcctcctc

SEQ ID NO: 6094820 - DNA, 25 bp, Homo sapien
gacaaggtgcgagccgtatggcctc

SEQ ID NO: 6094821 - DNA, 25 bp, Homo sapien
ctcctgatactcattgacagctaca

SEQ ID NO: 6094822 - DNA, 25 bp, Homo sapien
tgcatttgctcccagagttttgtaa

SEQ ID NO: 6094823 - DNA, 25 bp, Homo sapien
tccatcttcatatttctgttctctg

SEQ ID NO: 6094824 - DNA, 25 bp, Homo sapien
tgttggaggctaagtaacattcgat

SEQ ID NO: 6094825 - DNA, 25 bp, Homo sapien
attgacagctacaaggaaatctcct

SEQ ID NO: 6094826 - DNA, 25 bp, Homo sapien
tgcttttttcaccacagccttaatg

SEQ ID NO: 6094827 - DNA, 25 bp, Homo sapien
tttcaccacagccttaatgtaatct

SEQ ID NO: 6094828 - DNA, 25 bp, Homo sapien
gtgcgagccgtatggcctcccgaaa

SEQ ID NO: 6094829 - DNA, 25 bp, Homo sapien
ccactgggccgcctcactgtcgctg

SEQ ID NO: 6094830 - DNA, 25 bp, Homo sapien
agcaattccatcttcatatttctgt

SEQ ID NO: 6094831 - DNA, 25 bp, Homo sapien
cttccccactcccttccatgtcgtc

SEQ ID NO: 6094832 - DNA, 25 bp, Homo sapien
tgctcccagagttttgtaaacgttg

SEQ ID NO: 6094833 - DNA, 25 bp, Homo sapien
ctaataatgttttggctttctcctg

SEQ ID NO: 6094834 - DNA, 25 bp, Homo sapien
cctctagagacttctggtcattggg

SEQ ID NO: 6094835 - DNA, 25 bp, Homo sapien
tctccatcttctgcatcccctctag

SEQ ID NO: 6094836 - DNA, 25 bp, Homo sapien
ccttaatgtaatctggcctttgggt

SEQ ID NO: 6094837 - DNA, 25 bp, Homo sapien
gttcctcagcaaagcaattccatct

SEQ ID NO: 6094838 - DNA, 25 bp, Homo sapien
cctgagtggcatccgtgggactctc

SEQ ID NO: 6094839 - DNA, 25 bp, Homo sapien
cagcaaagcaattccatcttcatat

SEQ ID NO: 6094840 - DNA, 25 bp, Homo sapien
gctaagtagttctgcttttttcacc

SEQ ID NO: 6094841 - DNA, 25 bp, Homo sapien
ccacagccttaatgtaatctggcct

SEQ ID NO: 6094842 - DNA, 25 bp, Homo sapien
actatactggtccattgcctcctga

SEQ ID NO: 6094843 - DNA, 25 bp, Homo sapien
aacaatctaagcgacaaggtgcgag

SEQ ID NO: 6094844 - DNA, 25 bp, Homo sapien
tgggccgcctcactgtcgctgccct

SEQ ID NO: 6094845 - DNA, 25 bp, Homo sapien
acttagtgctatactatactggtcc

SEQ ID NO: 6094846 - DNA, 25 bp, Homo sapien
ccgatgcaggacacagtcactctga

SEQ ID NO: 6094847 - DNA, 25 bp, Homo sapien
tctcctgtgtcactgggtcttcaag

SEQ ID NO: 6094848 - DNA, 25 bp, Homo sapien
cctcctcctgagtggcatccgtggg

SEQ ID NO: 6094849 - DNA, 25 bp, Homo sapien
agacttctggtcattggggtccaaa

SEQ ID NO: 6094850 - DNA, 25 bp, Homo sapien
attggggtccaaacttagtgctata

SEQ ID NO: 6094851 - DNA, 25 bp, Homo sapien
tggcatccgtgggactctcctcctt

SEQ ID NO: 6094852 - DNA, 25 bp, Homo sapien
ctgggtcttcaagacaaacggtggc

SEQ ID NO: 6094853 - DNA, 25 bp, Homo sapien
tagttctgcttttttcaccacagcc

SEQ ID NO: 6094854 - DNA, 25 bp, Homo sapien
cattgcctcctgatactcattgaca

SEQ ID NO: 6094855 - DNA, 25 bp, Homo sapien
actctgattagccagtgcgttcctc

SEQ ID NO: 6094856 - DNA, 25 bp, Homo sapien
ccgtgggactctcctccttctccat

SEQ ID NO: 6094857 - DNA, 25 bp, Homo sapien
tcttctgcatcccctctagagactt

SEQ ID NO: 6094858 - DNA, 25 bp, Homo sapien
atctcctaggatccgatgcaggaca

SEQ ID NO: 6094859 - DNA, 25 bp, Homo sapien
ttctctgctaagtagttctgctttt

SEQ ID NO: 6094860 - DNA, 25 bp, Homo sapien
ggtctgtgcatttgctcccagagtt

SEQ ID NO: 6094861 - DNA, 25 bp, Homo sapien
ctttatctaataatgttttggcttt

SEQ ID NO: 6094862 - DNA, 25 bp, Homo sapien
taagaccttcataacaatctaagcg

SEQ ID NO: 6094863 - DNA, 25 bp, Homo sapien
ctaagcgacaaggtgcgagccgtat

SEQ ID NO: 6094864 - DNA, 25 bp, Homo sapien
cccttcttccccactcccttccatg

SEQ ID NO: 6094865 - DNA, 25 bp, Homo sapien
gtgtcactgggtcttcaagacaaac

SEQ ID NO: 6094866 - DNA, 25 bp, Homo sapien
ggtaagggtctgtgcatttgctccc

SEQ ID NO: 6094867 - DNA, 25 bp, Homo sapien
actgtcgctgccctccaggtcccct

SEQ ID NO: 6094868 - DNA, 25 bp, Homo sapien
atactcattgacagctacaaggaaa

SEQ ID NO: 6094869 - DNA, 25 bp, Homo sapien
ctggtcattggggtccaaacttagt

SEQ ID NO: 6094870 - DNA, 25 bp, Homo sapien
agctacaaggaaatctcctaggatc

SEQ ID NO: 6094871 - DNA, 25 bp, Homo sapien
tttctgttctctgctaagtagttct

SEQ ID NO: 6094872 - DNA, 25 bp, Homo sapien
gactctcctccttctccatcttctg

SEQ ID NO: 6094873 - DNA, 25 bp, Homo sapien
ccacatcctcctcctgagtggcatc

SEQ ID NO: 6094874 - DNA, 25 bp, Homo sapien
taggatccgatgcaggacacagtca

SEQ ID NO: 6094875 - DNA, 25 bp, Homo sapien
cttctcgaatactgttggaggctaa

SEQ ID NO: 6094876 - DNA, 25 bp, Homo sapien
tggctttctcctgtgtcactgggtc

SEQ ID NO: 6094877 - DNA, 25 bp, Homo sapien
ttcatatttctgttctctgctaagt

SEQ ID NO: 6094878 - DNA, 25 bp, Homo sapien
cagtgcgttcctcagcaaagcaatt

SEQ ID NO: 6094879 - DNA, 25 bp, Homo sapien
tgctatactatactggtccattgcc

SEQ ID NO: 6094880 - DNA, 25 bp, Homo sapien
atgttttggctttctcctgtgtcac

SEQ ID NO: 6094881 - DNA, 25 bp, Homo sapien
gcatcccctctagagacttctggtc

SEQ ID NO: 6094882 - DNA, 25 bp, Homo sapien
gctgccctccaggtccccttcttcc

SEQ ID NO: 6094883 - DNA, 25 bp, Homo sapien
caggacacagtcactctgattagcc

SEQ ID NO: 6094884 - DNA, 25 bp, Homo sapien
attagccagtgcgttcctcagcaaa

SEQ ID NO: 6094885 - DNA, 25 bp, Homo sapien
tcagggctttatctaataatgtttt

SEQ ID NO: 6094886 - DNA, 25 bp, Homo sapien
tgtcgtccacatcctcctcctgagt

SEQ ID NO: 6094887 - DNA, 25 bp, Homo sapien
ggcctcccgaaagtggattattgct

SEQ ID NO: 6094888 - DNA, 25 bp, Homo sapien
ctggtccattgcctcctgatactca

SEQ ID NO: 6094889 - DNA, 25 bp, Homo sapien
cttcaagacaaacggtggctaaaag

SEQ ID NO: 6094890 - DNA, 25 bp, Homo sapien
cctccttctccatcttctgcatccc

SEQ ID NO: 6094891 - DNA, 25 bp, Homo sapien
gccgtatggcctcccgaaagtggat

SEQ ID NO: 6094892 - DNA, 25 bp, Homo sapien
aaggaaatctcctaggatccgatgc

SEQ ID NO: 6094893 - DNA, 25 bp, Homo sapien
gcctcactgtcgctgccctccaggt

SEQ ID NO: 6094894 - DNA, 25 bp, Homo sapien
aggctaagtaacattcgataagacc

SEQ ID NO: 6094895 - DNA, 25 bp, Homo sapien
taaacgttgttagccattaccattg

SEQ ID NO: 6094896 - DNA, 25 bp, Homo sapien
agtaacattcgataagaccttcata

SEQ ID NO: 6094897 - DNA, 25 bp, Homo sapien
attcgataagaccttcataacaatc

SEQ ID NO: 6094898 - DNA, 25 bp, Homo sapien
ctggcctttgggtcagggctttatc

SEQ ID NO: 6094899 - DNA, 25 bp, Homo sapien
cactcccttccatgtcgtccacatc

SEQ ID NO: 6094900 - DNA, 25 bp, Homo sapien
ctaaaagggtaagggtctgtgcatt

SEQ ID NO: 6094901 - DNA, 25 bp, Homo sapien
tttgggtcagggctttatctaataa

SEQ ID NO: 6094902 - DNA, 25 bp, Homo sapien
tgttagccattaccattgcttctcg

SEQ ID NO: 6094903 - DNA, 25 bp, Homo sapien
cttcataacaatctaagcgacaagg

SEQ ID NO: 6094904 - DNA, 25 bp, Homo sapien
ccattgcttctcgaatactgttgga

SEQ ID NO: 6094905 - DNA, 25 bp, Homo sapien
tgtaatctggcctttgggtcagggc

SEQ ID NO: 6094906 - DNA, 25 bp, Homo sapien
ctaactcgtttaacaggtgttcctg

SEQ ID NO: 6094907 - DNA, 25 bp, Homo sapien
catgtatctcatgcaaaaagttgtt

SEQ ID NO: 6094908 - DNA, 25 bp, Homo sapien
gacgggcttcatagcttaatcctgc

SEQ ID NO: 6094909 - DNA, 25 bp, Homo sapien
gacaagtgtgttcagaagtggtttc

SEQ ID NO: 6094910 - DNA, 25 bp, Homo sapien
ctaaatgctgaggatcatgtatctc

SEQ ID NO: 6094911 - DNA, 25 bp, Homo sapien
agatttgtgagcatcccatttcgtc

SEQ ID NO: 6094912 - DNA, 25 bp, Homo sapien
tgaagcatctgcagtttctaaatgc

SEQ ID NO: 6094913 - DNA, 25 bp, Homo sapien
gctgggcagtaaggacacgatttct

SEQ ID NO: 6094914 - DNA, 25 bp, Homo sapien
ggacacgatttcttctcaagagaca

SEQ ID NO: 6094915 - DNA, 25 bp, Homo sapien
taaaagccatcgttttggtcataac

SEQ ID NO: 6094916 - DNA, 25 bp, Homo sapien
tctggtgatacaacatgacgggctt

SEQ ID NO: 6094917 - DNA, 25 bp, Homo sapien
cctgtgccagttcttttgaaatgct

SEQ ID NO: 6094918 - DNA, 25 bp, Homo sapien
aagtctttcaagtgggcttctaaca

SEQ ID NO: 6094919 - DNA, 25 bp, Homo sapien
caagtctttcaagtgggcttctaac

SEQ ID NO: 6094920 - DNA, 25 bp, Homo sapien
ccaagtctttcaagtgggcttctaa

SEQ ID NO: 6094921 - DNA, 25 bp, Homo sapien
tccaagtctttcaagtgggcttcta

SEQ ID NO: 6094922 - DNA, 25 bp, Homo sapien
ccctcctctagattcgcagccctag

SEQ ID NO: 6094923 - DNA, 25 bp, Homo sapien
attcgcagccctagttgtcccagga

SEQ ID NO: 6094924 - DNA, 25 bp, Homo sapien
agattcgcagccctagttgtcccag

SEQ ID NO: 6094925 - DNA, 25 bp, Homo sapien
ccccctcctctagattcgcagccct

SEQ ID NO: 6094926 - DNA, 25 bp, Homo sapien
gccccctcctctagattcgcagccc

SEQ ID NO: 6094927 - DNA, 25 bp, Homo sapien
gattcgcagccctagttgtcccagg

SEQ ID NO: 6094928 - DNA, 25 bp, Homo sapien
cctcctctagattcgcagccctagt

SEQ ID NO: 6094929 - DNA, 25 bp, Homo sapien
cccctcctctagattcgcagcccta

SEQ ID NO: 6094930 - DNA, 25 bp, Homo sapien
atgtggcaaggcacagaggtagtcc

SEQ ID NO: 6094931 - DNA, 25 bp, Homo sapien
cagaggtagtccctttaggtccctg

SEQ ID NO: 6094932 - DNA, 25 bp, Homo sapien
cgcgactggcgtaccaggcaggatt

SEQ ID NO: 6094933 - DNA, 25 bp, Homo sapien
catggagtgccgatgggtacgactt

SEQ ID NO: 6094934 - DNA, 25 bp, Homo sapien
agtgccgatgggtacgacttgcagc

SEQ ID NO: 6094935 - DNA, 25 bp, Homo sapien
ccatggagtgccgatgggtacgact

SEQ ID NO: 6094936 - DNA, 25 bp, Homo sapien
ctgatcccgcgactggcgtaccagg

SEQ ID NO: 6094937 - DNA, 25 bp, Homo sapien
acaggcctgatcccgcgactggcgt

SEQ ID NO: 6094938 - DNA, 25 bp, Homo sapien
ttgccctcctccgaccgaagcggcc

SEQ ID NO: 6094939 - DNA, 25 bp, Homo sapien
tgccgatgggtacgacttgcagctc

SEQ ID NO: 6094940 - DNA, 25 bp, Homo sapien
gggtacgacttgcagctccccgcag

SEQ ID NO: 6094941 - DNA, 25 bp, Homo sapien
cgatgggtacgacttgcagctcccc

SEQ ID NO: 6094942 - DNA, 25 bp, Homo sapien
actggcgtaccaggcaggattgatg

SEQ ID NO: 6094943 - DNA, 25 bp, Homo sapien
atctccatggagtgccgatgggtac

SEQ ID NO: 6094944 - DNA, 25 bp, Homo sapien
gtaaatacctagtggtctcaccaga

SEQ ID NO: 6094945 - DNA, 25 bp, Homo sapien
tatttgatgaccaaatagtgtccgt

SEQ ID NO: 6094946 - DNA, 25 bp, Homo sapien
ggttggtactgcagaaatatttccc

SEQ ID NO: 6094947 - DNA, 25 bp, Homo sapien
actacgggctcctgccaccagtttt

SEQ ID NO: 6094948 - DNA, 25 bp, Homo sapien
tctttgtgtaaagggcagcctgtca

SEQ ID NO: 6094949 - DNA, 25 bp, Homo sapien
gatggagtctcccaatgttgcccag

SEQ ID NO: 6094950 - DNA, 25 bp, Homo sapien
gataggcatgaaccaccattcccag

SEQ ID NO: 6094951 - DNA, 25 bp, Homo sapien
tagcatgctactctgttcttgtaaa

SEQ ID NO: 6094952 - DNA, 25 bp, Homo sapien
aaacattccgctttctgaggtagac

SEQ ID NO: 6094953 - DNA, 25 bp, Homo sapien
cagatgtttgcaaatcagaactggg

SEQ ID NO: 6094954 - DNA, 25 bp, Homo sapien
gcagcctgtcaggaaatagcatgct

SEQ ID NO: 6094955 - DNA, 25 bp, Homo sapien
gaagccatcagtaagagtaattttg

SEQ ID NO: 6094956 - DNA, 25 bp, Homo sapien
ggaacaaagactcatctacctccac

SEQ ID NO: 6094957 - DNA, 25 bp, Homo sapien
gactcatctacctccacgttgtttc

SEQ ID NO: 6094958 - DNA, 25 bp, Homo sapien
attatgatctgtttcaaatagttgt

SEQ ID NO: 6094959 - DNA, 25 bp, Homo sapien
gaacaaagactcatctacctccacg

SEQ ID NO: 6094960 - DNA, 25 bp, Homo sapien
ttggaacaaagactcatctacctcc

SEQ ID NO: 6094961 - DNA, 25 bp, Homo sapien
agactcatctacctccacgttgttt

SEQ ID NO: 6094962 - DNA, 25 bp, Homo sapien
tggaacaaagactcatctacctcca

SEQ ID NO: 6094963 - DNA, 25 bp, Homo sapien
tcatctacctccacgttgtttccag

SEQ ID NO: 6094964 - DNA, 25 bp, Homo sapien
aagactcatctacctccacgttgtt

SEQ ID NO: 6094965 - DNA, 25 bp, Homo sapien
acaaagactcatctacctccacgtt

SEQ ID NO: 6094966 - DNA, 25 bp, Homo sapien
aaagactcatctacctccacgttgt

SEQ ID NO: 6094967 - DNA, 25 bp, Homo sapien
caaagactcatctacctccacgttg

SEQ ID NO: 6094968 - DNA, 25 bp, Homo sapien
tcatctcaagaacatttaagttggg

SEQ ID NO: 6094969 - DNA, 25 bp, Homo sapien
actttgtcaattaggtctgctggtc

SEQ ID NO: 6094970 - DNA, 25 bp, Homo sapien
tgttgttagaatctgacaggcttca

SEQ ID NO: 6094971 - DNA, 25 bp, Homo sapien
tcttcatcaggagctttgaccacca

SEQ ID NO: 6094972 - DNA, 25 bp, Homo sapien
catgggccaataatgcaatcagggt

SEQ ID NO: 6094973 - DNA, 25 bp, Homo sapien
agcctggtgcaatctgagtacgtcc

SEQ ID NO: 6094974 - DNA, 25 bp, Homo sapien
caataatgcaatcagggtttcttca

SEQ ID NO: 6094975 - DNA, 25 bp, Homo sapien
taggacagtttgagagcctggtgca

SEQ ID NO: 6094976 - DNA, 25 bp, Homo sapien
caaagcatactcgaaggctccagcc

SEQ ID NO: 6094977 - DNA, 25 bp, Homo sapien
gggagcatcccaaagcatactcgaa

SEQ ID NO: 6094978 - DNA, 25 bp, Homo sapien
gagtacgtccagcatcttgaattaa

SEQ ID NO: 6094979 - DNA, 25 bp, Homo sapien
taagtcatttcgaaccacaagaatc

SEQ ID NO: 6094980 - DNA, 25 bp, Homo sapien
ataggatgtttcctttttcaccata

SEQ ID NO: 6094981 - DNA, 25 bp, Homo sapien
gggaaagctgtaactctgtgagatg

SEQ ID NO: 6094982 - DNA, 25 bp, Homo sapien
atatcaatttgcgaattccacaaga

SEQ ID NO: 6094983 - DNA, 25 bp, Homo sapien
tccaaataccactttgcaaatgcca

SEQ ID NO: 6094984 - DNA, 25 bp, Homo sapien
cttcttgaggggaaagctacaattc

SEQ ID NO: 6094985 - DNA, 25 bp, Homo sapien
agaacacaaagcaggttctcagaag

SEQ ID NO: 6094986 - DNA, 25 bp, Homo sapien
caaatatcaccttgcaaattccaca

SEQ ID NO: 6094987 - DNA, 25 bp, Homo sapien
tttgcaccatagacctctatgggct

SEQ ID NO: 6094988 - DNA, 25 bp, Homo sapien
tcttttcagtttttctcttaggata

SEQ ID NO: 6094989 - DNA, 25 bp, Homo sapien
gatcggcttcttgaggggaaagcta

SEQ ID NO: 6094990 - DNA, 25 bp, Homo sapien
tttgaaaattccacaacaacagtct

SEQ ID NO: 6094991 - DNA, 25 bp, Homo sapien
tctctaagggctttaaaatatcact

SEQ ID NO: 6094992 - DNA, 25 bp, Homo sapien
atgggcttccaaatatcaatttgcg

SEQ ID NO: 6094993 - DNA, 25 bp, Homo sapien
caaaaggcttcttgaggagaaagct

SEQ ID NO: 6094994 - DNA, 25 bp, Homo sapien
tctgggcttccaaatatcaccttgc

SEQ ID NO: 6094995 - DNA, 25 bp, Homo sapien
tttttcaccctagcccttgatgggc

SEQ ID NO: 6094996 - DNA, 25 bp, Homo sapien
agtttcccagaaagattcttttcag

SEQ ID NO: 6094997 - DNA, 25 bp, Homo sapien
gcgaattccacaagaacagtcttag

SEQ ID NO: 6094998 - DNA, 25 bp, Homo sapien
ttgcaaattccacaagaacagccgt

SEQ ID NO: 6094999 - DNA, 25 bp, Homo sapien
gaaacagcctttgcaaaaggcttct

SEQ ID NO: 6095000 - DNA, 25 bp, Homo sapien
ggatatttccttttgcaccatagac

SEQ ID NO: 6095001 - DNA, 25 bp, Homo sapien
ctcttaggatatttccttttgcacc

SEQ ID NO: 6095002 - DNA, 25 bp, Homo sapien
aggttctcagaagcttctttccagg

SEQ ID NO: 6095003 - DNA, 25 bp, Homo sapien
gcttcttgaggagaaagctgtaact

SEQ ID NO: 6095004 - DNA, 25 bp, Homo sapien
tatcactttgaaaattccacaacaa

SEQ ID NO: 6095005 - DNA, 25 bp, Homo sapien
acctctatgggcttccaaatatcaa

SEQ ID NO: 6095006 - DNA, 25 bp, Homo sapien
agaacacaaagcagtttcccagaaa

SEQ ID NO: 6095007 - DNA, 25 bp, Homo sapien
tgaggagaaagctgtaactctgtga

SEQ ID NO: 6095008 - DNA, 25 bp, Homo sapien
aagctgtaattctgtgagatgaatt

SEQ ID NO: 6095009 - DNA, 25 bp, Homo sapien
aatttgcgaattccacaagaacagt

SEQ ID NO: 6095010 - DNA, 25 bp, Homo sapien
tgtgagatgaattaacagaacacaa

SEQ ID NO: 6095011 - DNA, 25 bp, Homo sapien
acaaagcagtttcccagaaagattc

SEQ ID NO: 6095012 - DNA, 25 bp, Homo sapien
tccacaagaacagtcttagtgatcg

SEQ ID NO: 6095013 - DNA, 25 bp, Homo sapien
atgaattaacagaacacaaagcagt

SEQ ID NO: 6095014 - DNA, 25 bp, Homo sapien
ccatagacctctatgggcttccaaa

SEQ ID NO: 6095015 - DNA, 25 bp, Homo sapien
caaatgccacaagaaacagcctttg

SEQ ID NO: 6095016 - DNA, 25 bp, Homo sapien
aattccacaacaacagtcttaggca

SEQ ID NO: 6095017 - DNA, 25 bp, Homo sapien
taagggctttaaaatatcactttga

SEQ ID NO: 6095018 - DNA, 25 bp, Homo sapien
ccagtttttatcataggatgtttcc

SEQ ID NO: 6095019 - DNA, 25 bp, Homo sapien
cagaaagattcttttcagtttttct

SEQ ID NO: 6095020 - DNA, 25 bp, Homo sapien
cccttgatgggcttccaaataccac

SEQ ID NO: 6095021 - DNA, 25 bp, Homo sapien
atccacagaacacaaagcagtttcc

SEQ ID NO: 6095022 - DNA, 25 bp, Homo sapien
caaagcaggttctcagaagcttctt

SEQ ID NO: 6095023 - DNA, 25 bp, Homo sapien
ctttgcaaatgccacaagaaacagc

SEQ ID NO: 6095024 - DNA, 25 bp, Homo sapien
ccacaagaaacagcctttgcaaaag

SEQ ID NO: 6095025 - DNA, 25 bp, Homo sapien
ttaggcagaggcttcttgaagggaa

SEQ ID NO: 6095026 - DNA, 25 bp, Homo sapien
aattaacagaacacaaagcaggttc

SEQ ID NO: 6095027 - DNA, 25 bp, Homo sapien
gatgaattaacagaacacaaagcag

SEQ ID NO: 6095028 - DNA, 25 bp, Homo sapien
cttgaggggaaagctgtaactctgt

SEQ ID NO: 6095029 - DNA, 25 bp, Homo sapien
tcagaagcttctttccaggttttaa

SEQ ID NO: 6095030 - DNA, 25 bp, Homo sapien
ccctagcccttgatgggcttccaaa

SEQ ID NO: 6095031 - DNA, 25 bp, Homo sapien
ttaacagaacacaaagcagtttcgc

SEQ ID NO: 6095032 - DNA, 25 bp, Homo sapien
taattctgtgagatgaattaacaga

SEQ ID NO: 6095033 - DNA, 25 bp, Homo sapien
gcctttgcaaaaggcttcttgagga

SEQ ID NO: 6095034 - DNA, 25 bp, Homo sapien
gtcttagtgatcggcttcttgaggg

SEQ ID NO: 6095035 - DNA, 25 bp, Homo sapien
ctctgtgagatgaattaacagaaca

SEQ ID NO: 6095036 - DNA, 25 bp, Homo sapien
atgggcttccaaataccactttgca

SEQ ID NO: 6095037 - DNA, 25 bp, Homo sapien
acagtcttaggcagaggcttcttga

SEQ ID NO: 6095038 - DNA, 25 bp, Homo sapien
tgtttcctttttcaccatagccctc

SEQ ID NO: 6095039 - DNA, 25 bp, Homo sapien
gaacacaaagcagtttcgcagaaag

SEQ ID NO: 6095040 - DNA, 25 bp, Homo sapien
agccgtaataaacggcttcttgagg

SEQ ID NO: 6095041 - DNA, 25 bp, Homo sapien
agaggcttcttgaagggaaagctgt

SEQ ID NO: 6095042 - DNA, 25 bp, Homo sapien
aaatgaatccacagaacacaaagca

SEQ ID NO: 6095043 - DNA, 25 bp, Homo sapien
tttccttttgcaccatagacctcta

SEQ ID NO: 6095044 - DNA, 25 bp, Homo sapien
ttccaaatatcaatttgcgaattcc

SEQ ID NO: 6095045 - DNA, 25 bp, Homo sapien
ataccactttgcaaatgccacaaga

SEQ ID NO: 6095046 - DNA, 25 bp, Homo sapien
tttttcaccatagccctctctgggc

SEQ ID NO: 6095047 - DNA, 25 bp, Homo sapien
aagggaaagctgtaattctgtgaga

SEQ ID NO: 6095048 - DNA, 25 bp, Homo sapien
ttcgcagaaagcttctttccagttt

SEQ ID NO: 6095049 - DNA, 25 bp, Homo sapien
caagaacagccgtaataaacggctt

SEQ ID NO: 6095050 - DNA, 25 bp, Homo sapien
attccacaagaacagccgtaataaa

SEQ ID NO: 6095051 - DNA, 25 bp, Homo sapien
tctgtgaaatgaatccacagaacac

SEQ ID NO: 6095052 - DNA, 25 bp, Homo sapien
gaaagctgtaactctgtgaaatgaa

SEQ ID NO: 6095053 - DNA, 25 bp, Homo sapien
agaacagtcttagtgatcggcttct

SEQ ID NO: 6095054 - DNA, 25 bp, Homo sapien
gcttccaaatatcaccttgcaaatt

SEQ ID NO: 6095055 - DNA, 25 bp, Homo sapien
agattcttttcagtttttctcttag

SEQ ID NO: 6095056 - DNA, 25 bp, Homo sapien
gaaagcttctttccagtttttatca

SEQ ID NO: 6095057 - DNA, 25 bp, Homo sapien
tgtaactctgtgaaatgaatccaca

SEQ ID NO: 6095058 - DNA, 25 bp, Homo sapien
acaacaacagtcttaggcagaggct

SEQ ID NO: 6095059 - DNA, 25 bp, Homo sapien
tttatcataggatgtttcctttttc

SEQ ID NO: 6095060 - DNA, 25 bp, Homo sapien
ttcttgaagggaaagctgtaattct

SEQ ID NO: 6095061 - DNA, 25 bp, Homo sapien
gccctctctgggcttccaaatatca

SEQ ID NO: 6095062 - DNA, 25 bp, Homo sapien
acggcttcttgaggggaaagctgta

SEQ ID NO: 6095063 - DNA, 25 bp, Homo sapien
accatagccctctctgggcttccaa

SEQ ID NO: 6095064 - DNA, 25 bp, Homo sapien
ttaaaatatcactttgaaaattcca

SEQ ID NO: 6095065 - DNA, 25 bp, Homo sapien
ttctttccagtttttatcataggat

SEQ ID NO: 6095066 - DNA, 25 bp, Homo sapien
cagtttttctcttaggatatttcct

SEQ ID NO: 6095067 - DNA, 25 bp, Homo sapien
agcagtttcgcagaaagcttctttc

SEQ ID NO: 6095068 - DNA, 25 bp, Homo sapien
caccgggccgaagaggttcctgcag

SEQ ID NO: 6095069 - DNA, 25 bp, Homo sapien
cagagttagccggagccccaattaa

SEQ ID NO: 6095070 - DNA, 25 bp, Homo sapien
ttccttattcctgcgcattgctccg

SEQ ID NO: 6095071 - DNA, 25 bp, Homo sapien
gacggatcagtctttgggtccacca

SEQ ID NO: 6095072 - DNA, 25 bp, Homo sapien
gggtccaccaaatgcgtgtcctcag

SEQ ID NO: 6095073 - DNA, 25 bp, Homo sapien
ctgctccacagaaccggcatttggg

SEQ ID NO: 6095074 - DNA, 25 bp, Homo sapien
ccgtctggctgtccgacggatcagt

SEQ ID NO: 6095075 - DNA, 25 bp, Homo sapien
cgtcggttgcaggtcgcttccttat

SEQ ID NO: 6095076 - DNA, 25 bp, Homo sapien
ccaaatgcgtgtcctcagagttagc

SEQ ID NO: 6095077 - DNA, 25 bp, Homo sapien
tccaggctagggctcccgttagaca

SEQ ID NO: 6095078 - DNA, 25 bp, Homo sapien
tcgaaattccacttgcgctggctcg

SEQ ID NO: 6095079 - DNA, 25 bp, Homo sapien
ccgttagacactcgcacgtttgaca

SEQ ID NO: 6095080 - DNA, 25 bp, Homo sapien
cctgccacccgtggacccctagaca

SEQ ID NO: 6095081 - DNA, 25 bp, Homo sapien
ccttttggctctgcttcagacaggg

SEQ ID NO: 6095082 - DNA, 25 bp, Homo sapien
atggacaccctatgaatatggcagg

SEQ ID NO: 6095083 - DNA, 25 bp, Homo sapien
ctgaggctgaggctgagggtggccg

SEQ ID NO: 6095084 - DNA, 25 bp, Homo sapien
caggcagtttgattctccctgactg

SEQ ID NO: 6095085 - DNA, 25 bp, Homo sapien
ccaaatagagtcctcctcacggttt

SEQ ID NO: 6095086 - DNA, 25 bp, Homo sapien
caaatccaggatccaaatagagtcc

SEQ ID NO: 6095087 - DNA, 25 bp, Homo sapien
catcctaggcctgcctagatctggg

SEQ ID NO: 6095088 - DNA, 25 bp, Homo sapien
gagtctttctaaaagatgatggtct

SEQ ID NO: 6095089 - DNA, 25 bp, Homo sapien
ggcagtaccagaccccagcgagtct

SEQ ID NO: 6095090 - DNA, 25 bp, Homo sapien
accctatgaatatggcaggaccagg

SEQ ID NO: 6095091 - DNA, 25 bp, Homo sapien
ctgggcctcccactgagggttaggc

SEQ ID NO: 6095092 - DNA, 25 bp, Homo sapien
ccagaccccagcgagtctttctaaa

SEQ ID NO: 6095093 - DNA, 25 bp, Homo sapien
aagtcccttggtgactcttcaggcc

SEQ ID NO: 6095094 - DNA, 25 bp, Homo sapien
gctgagatgtgccagtcaggttaga

SEQ ID NO: 6095095 - DNA, 25 bp, Homo sapien
gactcttcaggcctgggcctcccac

SEQ ID NO: 6095096 - DNA, 25 bp, Homo sapien
atggtctcagcggtgccttccccat

SEQ ID NO: 6095097 - DNA, 25 bp, Homo sapien
acccattctggccttttggctctgc

SEQ ID NO: 6095098 - DNA, 25 bp, Homo sapien
ctagacagcaccatcctaggcctgc

SEQ ID NO: 6095099 - DNA, 25 bp, Homo sapien
gctgagggtggccgggcagctggag

SEQ ID NO: 6095100 - DNA, 25 bp, Homo sapien
tcagcggtgccttccccatctgcca

SEQ ID NO: 6095101 - DNA, 25 bp, Homo sapien
taggggcagctgtgacaccagggta

SEQ ID NO: 6095102 - DNA, 25 bp, Homo sapien
tcctgggggcagtaccagaccccag

SEQ ID NO: 6095103 - DNA, 25 bp, Homo sapien
ggctctgcttcagacagggcctcct

SEQ ID NO: 6095104 - DNA, 25 bp, Homo sapien
gacaggtagccagggcacaaggcca

SEQ ID NO: 6095105 - DNA, 25 bp, Homo sapien
ccagtgtctgagattgggagcttat

SEQ ID NO: 6095106 - DNA, 25 bp, Homo sapien
cccagcgagtctttctaaaagatga

SEQ ID NO: 6095107 - DNA, 25 bp, Homo sapien
aatggagacaggtagccagggcaca

SEQ ID NO: 6095108 - DNA, 25 bp, Homo sapien
gggcacaaggccagcctctgaattc

SEQ ID NO: 6095109 - DNA, 25 bp, Homo sapien
tcacactaggggcagctgtgacacc

SEQ ID NO: 6095110 - DNA, 25 bp, Homo sapien
cagctgtgacaccagggtaggggac

SEQ ID NO: 6095111 - DNA, 25 bp, Homo sapien
ccagctctcatttccagtgcctgag

SEQ ID NO: 6095112 - DNA, 25 bp, Homo sapien
tgacaccagggtaggggacccattc

SEQ ID NO: 6095113 - DNA, 25 bp, Homo sapien
cagggtaggggacccattctggcct

SEQ ID NO: 6095114 - DNA, 25 bp, Homo sapien
ttctaaaagatgatggtctcagcgg

SEQ ID NO: 6095115 - DNA, 25 bp, Homo sapien
agcctctgaattcctgccacccgtg

SEQ ID NO: 6095116 - DNA, 25 bp, Homo sapien
tagccagggcacaaggccagcctct

SEQ ID NO: 6095117 - DNA, 25 bp, Homo sapien
tctcccctctcctggttaggctgag

SEQ ID NO: 6095118 - DNA, 25 bp, Homo sapien
acccgtggacccctagacagcacca

SEQ ID NO: 6095119 - DNA, 25 bp, Homo sapien
gcagagaacctccactagtcctggg

SEQ ID NO: 6095120 - DNA, 25 bp, Homo sapien
agagtcctcctcacggtttttcact

SEQ ID NO: 6095121 - DNA, 25 bp, Homo sapien
agcaccatcctaggcctgcctagat

SEQ ID NO: 6095122 - DNA, 25 bp, Homo sapien
cagccctcacactaggggcagctgt

SEQ ID NO: 6095123 - DNA, 25 bp, Homo sapien
tctgccagctccaagtcccttggtg

SEQ ID NO: 6095124 - DNA, 25 bp, Homo sapien
aacccttaccctcccagctctcatt

SEQ ID NO: 6095125 - DNA, 25 bp, Homo sapien
gcttcagacagggcctcctctaact

SEQ ID NO: 6095126 - DNA, 25 bp, Homo sapien
ttcacttctcccctctcctggttag

SEQ ID NO: 6095127 - DNA, 25 bp, Homo sapien
ctcccactgagggttaggctgaggc

SEQ ID NO: 6095128 - DNA, 25 bp, Homo sapien
aacctccactagtcctgggggcagt

SEQ ID NO: 6095129 - DNA, 25 bp, Homo sapien
gttaggctgaggctgaggctgaggg

SEQ ID NO: 6095130 - DNA, 25 bp, Homo sapien
cttggtgactcttcaggcctgggcc

SEQ ID NO: 6095131 - DNA, 25 bp, Homo sapien
aggtgggcagagaacctccactagt

SEQ ID NO: 6095132 - DNA, 25 bp, Homo sapien
gggagacaggcagtttgattctccc

SEQ ID NO: 6095133 - DNA, 25 bp, Homo sapien
ctcatttccagtgcctgaggtgggc

SEQ ID NO: 6095134 - DNA, 25 bp, Homo sapien
ttctccctgactgccagtgtctgag

SEQ ID NO: 6095135 - DNA, 25 bp, Homo sapien
tctgagattgggagcttatgaggca

SEQ ID NO: 6095136 - DNA, 25 bp, Homo sapien
gtttgattctccctgactgccagtg

SEQ ID NO: 6095137 - DNA, 25 bp, Homo sapien
tgactgccagtgtctgagattggga

SEQ ID NO: 6095138 - DNA, 25 bp, Homo sapien
cagggcctcctctaactccaaccct

SEQ ID NO: 6095139 - DNA, 25 bp, Homo sapien
cactagtcctgggggcagtaccaga

SEQ ID NO: 6095140 - DNA, 25 bp, Homo sapien
aggcctgcctagatctgggacacca

SEQ ID NO: 6095141 - DNA, 25 bp, Homo sapien
tggttaggctgagatgtgccagtca

SEQ ID NO: 6095142 - DNA, 25 bp, Homo sapien
gattgggagcttatgaggcagccct

SEQ ID NO: 6095143 - DNA, 25 bp, Homo sapien
tccccatctgccagctccaagtccc

SEQ ID NO: 6095144 - DNA, 25 bp, Homo sapien
ctgagggttaggctgaggctgaggc

SEQ ID NO: 6095145 - DNA, 25 bp, Homo sapien
ggcaggaccagggagacaggcagtt

SEQ ID NO: 6095146 - DNA, 25 bp, Homo sapien
agctccaagtcccttggtgactctt

SEQ ID NO: 6095147 - DNA, 25 bp, Homo sapien
atgaggcagccctcacactaggggc

SEQ ID NO: 6095148 - DNA, 25 bp, Homo sapien
ctctcctggttaggctgagatgtgc

SEQ ID NO: 6095149 - DNA, 25 bp, Homo sapien
gagcttatgaggcagccctcacact

SEQ ID NO: 6095150 - DNA, 25 bp, Homo sapien
gcctgaggtgggcagagaacctcca

SEQ ID NO: 6095151 - DNA, 25 bp, Homo sapien
ccagtcaggttagaatggagacagg

SEQ ID NO: 6095152 - DNA, 25 bp, Homo sapien
caggatccaaatagagtcctcctca

SEQ ID NO: 6095153 - DNA, 25 bp, Homo sapien
gaccagggagacaggcagtttgatt

SEQ ID NO: 6095154 - DNA, 25 bp, Homo sapien
aggttagaatggagacaggtagcca

SEQ ID NO: 6095155 - DNA, 25 bp, Homo sapien
gatgtgccagtcaggttagaatgga

SEQ ID NO: 6095156 - DNA, 25 bp, Homo sapien
aagatgatggtctcagcggtgcctt

SEQ ID NO: 6095157 - DNA, 25 bp, Homo sapien
tcaggcctgggcctcccactgaggg

SEQ ID NO: 6095158 - DNA, 25 bp, Homo sapien
gtgccttccccatctgccagctcca

SEQ ID NO: 6095159 - DNA, 25 bp, Homo sapien
ctgaggctgagggtggccgggcagc

SEQ ID NO: 6095160 - DNA, 25 bp, Homo sapien
tccagtgcctgaggtgggcagagaa

SEQ ID NO: 6095161 - DNA, 25 bp, Homo sapien
ttctggccttttggctctgcttcag

SEQ ID NO: 6095162 - DNA, 25 bp, Homo sapien
aaggccagcctctgaattcctgcca

SEQ ID NO: 6095163 - DNA, 25 bp, Homo sapien
accctcccagctctcatttccagtg

SEQ ID NO: 6095164 - DNA, 25 bp, Homo sapien
ctccaacccttaccctcccagctct

SEQ ID NO: 6095165 - DNA, 25 bp, Homo sapien
tgaattcctgccacccgtggacccc

SEQ ID NO: 6095166 - DNA, 25 bp, Homo sapien
gcctagatctgggacaccatgtgtg

SEQ ID NO: 6095167 - DNA, 25 bp, Homo sapien
tgaatatggcaggaccagggagaca

SEQ ID NO: 6095168 - DNA, 25 bp, Homo sapien
ggacccctagacagcaccatcctag

SEQ ID NO: 6095169 - DNA, 25 bp, Homo sapien
gcgttttgtcgaagaccacgaaggc

SEQ ID NO: 6095170 - DNA, 25 bp, Homo sapien
ccagcacaaacagcgtcttgcggct

SEQ ID NO: 6095171 - DNA, 25 bp, Homo sapien
gaagctcgttgtacacccagtctgc

SEQ ID NO: 6095172 - DNA, 25 bp, Homo sapien
cagaagttccggttatagaagtggt

SEQ ID NO: 6095173 - DNA, 25 bp, Homo sapien
aagctggcgcgcaagagaccactga

SEQ ID NO: 6095174 - DNA, 25 bp, Homo sapien
tgcgctctgcgttttgtcgaagacc

SEQ ID NO: 6095175 - DNA, 25 bp, Homo sapien
tgtccctggtcagggccatgcccag

SEQ ID NO: 6095176 - DNA, 25 bp, Homo sapien
ggtggcaccgtgcaggattccggct

SEQ ID NO: 6095177 - DNA, 25 bp, Homo sapien
cagtctgccactgcgctctgcgttt

SEQ ID NO: 6095178 - DNA, 25 bp, Homo sapien
tcttgcggctgccatagaccgaggc

SEQ ID NO: 6095179 - DNA, 25 bp, Homo sapien
cccggtccgtgtgggccagcacaaa

SEQ ID NO: 6095180 - DNA, 25 bp, Homo sapien
aagagaccactgacccggtccgtgt

SEQ ID NO: 6095181 - DNA, 25 bp, Homo sapien
gtggccacacgatagcccacagtgc

SEQ ID NO: 6095182 - DNA, 25 bp, Homo sapien
agcccaggatcgctagtccccaaag

SEQ ID NO: 6095183 - DNA, 25 bp, Homo sapien
tgaaaagtggccacacgatagccca

SEQ ID NO: 6095184 - DNA, 25 bp, Homo sapien
gcggcgtcctcgcagtcatgaaaag

SEQ ID NO: 6095185 - DNA, 25 bp, Homo sapien
aggtggagcccaggatcgctagtcc

SEQ ID NO: 6095186 - DNA, 25 bp, Homo sapien
agccggcggacaccagcaagtaggc

SEQ ID NO: 6095187 - DNA, 25 bp, Homo sapien
gaggaagggctgtccgcacaggaat

SEQ ID NO: 6095188 - DNA, 25 bp, Homo sapien
cccagggcatagcagccggcggaca

SEQ ID NO: 6095189 - DNA, 25 bp, Homo sapien
tcgcagtcatgaaaagtggccacac

SEQ ID NO: 6095190 - DNA, 25 bp, Homo sapien
gcgtcctcgcagtcatgaaaagtgg

SEQ ID NO: 6095191 - DNA, 25 bp, Homo sapien
ctgcgggctaagtcggctcgggcct

SEQ ID NO: 6095192 - DNA, 25 bp, Homo sapien
tctggctctgcagctcgcgtgcggc

SEQ ID NO: 6095193 - DNA, 25 bp, Homo sapien
ggtcaccagcagtgcgacatccttg

SEQ ID NO: 6095194 - DNA, 25 bp, Homo sapien
cgtagagaacgggattgaggccaca

SEQ ID NO: 6095195 - DNA, 25 bp, Homo sapien
ccagcagtgcgacatccttgcgttt

SEQ ID NO: 6095196 - DNA, 25 bp, Homo sapien
tcggcagtatccagcagcagggcga

SEQ ID NO: 6095197 - DNA, 25 bp, Homo sapien
gcgcagccagtagatcggcagtatc

SEQ ID NO: 6095198 - DNA, 25 bp, Homo sapien
aggctaccatgacgcccagcggcag

SEQ ID NO: 6095199 - DNA, 25 bp, Homo sapien
ccagaagcgcgtagcaggctaccat

SEQ ID NO: 6095200 - DNA, 25 bp, Homo sapien
aagatgaggcgacagcgtcgttggc

SEQ ID NO: 6095201 - DNA, 25 bp, Homo sapien
agtagatcggcagtatccagcagca

SEQ ID NO: 6095202 - DNA, 25 bp, Homo sapien
acacgatgacggagaccaagtgtgc

SEQ ID NO: 6095203 - DNA, 25 bp, Homo sapien
catccttgcgtttgctggcagggca

SEQ ID NO: 6095204 - DNA, 25 bp, Homo sapien
agggccaagccgctggtcaccagca

SEQ ID NO: 6095205 - DNA, 25 bp, Homo sapien
cgcgtcgagcacttgccgatctgtt

SEQ ID NO: 6095206 - DNA, 25 bp, Homo sapien
cacaccggccgcctctgactctgca

SEQ ID NO: 6095207 - DNA, 25 bp, Homo sapien
caccggccgcctctgactctgcaat

SEQ ID NO: 6095208 - DNA, 25 bp, Homo sapien
acgcgtcgagcacttgccgatctgt

SEQ ID NO: 6095209 - DNA, 25 bp, Homo sapien
cgagcacttgccgatctgttcctcc

SEQ ID NO: 6095210 - DNA, 25 bp, Homo sapien
tcgagcacttgccgatctgttcctc

SEQ ID NO: 6095211 - DNA, 25 bp, Homo sapien
gagcacttgccgatctgttcctcct

SEQ ID NO: 6095212 - DNA, 25 bp, Homo sapien
accggccgcctctgactctgcaata

SEQ ID NO: 6095213 - DNA, 25 bp, Homo sapien
ttctgtaatgtgtttatgattcctc

SEQ ID NO: 6095214 - DNA, 25 bp, Homo sapien
cgtcgagcacttgccgatctgttcc

SEQ ID NO: 6095215 - DNA, 25 bp, Homo sapien
acaccggccgcctctgactctgcaa

SEQ ID NO: 6095216 - DNA, 25 bp, Homo sapien
gcgtcgagcacttgccgatctgttc

SEQ ID NO: 6095217 - DNA, 25 bp, Homo sapien
ggcctctgaccaacagaccgtgttg

SEQ ID NO: 6095218 - DNA, 25 bp, Homo sapien
gtaccgtcatctgtataactgtttt

SEQ ID NO: 6095219 - DNA, 25 bp, Homo sapien
cagtaccgtcatctgtataactgtt

SEQ ID NO: 6095220 - DNA, 25 bp, Homo sapien
tcttgaccagtaccgtcatctgtat

SEQ ID NO: 6095221 - DNA, 25 bp, Homo sapien
catcttgaccagtaccgtcatctgt

SEQ ID NO: 6095222 - DNA, 25 bp, Homo sapien
ccagtaccgtcatctgtataactgt

SEQ ID NO: 6095223 - DNA, 25 bp, Homo sapien
gaccagtaccgtcatctgtataact

SEQ ID NO: 6095224 - DNA, 25 bp, Homo sapien
gcctctgaccaacagaccgtgttgt

SEQ ID NO: 6095225 - DNA, 25 bp, Homo sapien
ccatcttgaccagtaccgtcatctg

SEQ ID NO: 6095226 - DNA, 25 bp, Homo sapien
gggcctctgaccaacagaccgtgtt

SEQ ID NO: 6095227 - DNA, 25 bp, Homo sapien
tgggcctctgaccaacagaccgtgt

SEQ ID NO: 6095228 - DNA, 25 bp, Homo sapien
tgaccagtaccgtcatctgtataac

SEQ ID NO: 6095229 - DNA, 25 bp, Homo sapien
gaacatggatcagataatactcact

SEQ ID NO: 6095230 - DNA, 25 bp, Homo sapien
caccggagcatcactacaaatgtct

SEQ ID NO: 6095231 - DNA, 25 bp, Homo sapien
tagagcttaaactcattgatcagag

SEQ ID NO: 6095232 - DNA, 25 bp, Homo sapien
tgcggtactaccacaggataagagc

SEQ ID NO: 6095233 - DNA, 25 bp, Homo sapien
tgttcagtcacattcctggtggcct

SEQ ID NO: 6095234 - DNA, 25 bp, Homo sapien
atctgccgtgtgtgcctccccaggg

SEQ ID NO: 6095235 - DNA, 25 bp, Homo sapien
tcttgtgggcctcagtggttggatc

SEQ ID NO: 6095236 - DNA, 25 bp, Homo sapien
ccagggacacaattaagggaggcag

SEQ ID NO: 6095237 - DNA, 25 bp, Homo sapien
caggtaccacagagtcccaagaaca

SEQ ID NO: 6095238 - DNA, 25 bp, Homo sapien
cattgatcagagatgcggtactacc

SEQ ID NO: 6095239 - DNA, 25 bp, Homo sapien
ggataagagcagtgcacccaacagc

SEQ ID NO: 6095240 - DNA, 25 bp, Homo sapien
gatgaccagactcacaccggagcat

SEQ ID NO: 6095241 - DNA, 25 bp, Homo sapien
tatagaagctggcataggtatatcc

SEQ ID NO: 6095242 - DNA, 25 bp, Homo sapien
taaaaagtttagagggcagatgcaa

SEQ ID NO: 6095243 - DNA, 25 bp, Homo sapien
gggttaaaagaattctcctgcctca

SEQ ID NO: 6095244 - DNA, 25 bp, Homo sapien
taagcttacagagaccagaccaggt

SEQ ID NO: 6095245 - DNA, 25 bp, Homo sapien
taatggtgctttctccctgggcttg

SEQ ID NO: 6095246 - DNA, 25 bp, Homo sapien
gaaaatcaagatggtacctctctgc

SEQ ID NO: 6095247 - DNA, 25 bp, Homo sapien
ggcaagtgacctgccaataaagcag

SEQ ID NO: 6095248 - DNA, 25 bp, Homo sapien
gcattatcccgccagacactgtatt

SEQ ID NO: 6095249 - DNA, 25 bp, Homo sapien
taaagcaggtgcagctatagaagct

SEQ ID NO: 6095250 - DNA, 25 bp, Homo sapien
gcagatgcaattgtggcaagtgacc

SEQ ID NO: 6095251 - DNA, 25 bp, Homo sapien
ccctatattcagtagctccttgaga

SEQ ID NO: 6095252 - DNA, 25 bp, Homo sapien
cattcatgtctaggatacagtgtga

SEQ ID NO: 6095253 - DNA, 25 bp, Homo sapien
aaagccggcgatccagttggcagca

SEQ ID NO: 6095254 - DNA, 25 bp, Homo sapien
tgtgatcgcgtagaacatgcggccc

SEQ ID NO: 6095255 - DNA, 25 bp, Homo sapien
tgagcacagccaacataagcatgaa

SEQ ID NO: 6095256 - DNA, 25 bp, Homo sapien
catcttgcggtgacgatactcgaag

SEQ ID NO: 6095257 - DNA, 25 bp, Homo sapien
gcgaagctcatccaaacagcagtgg

SEQ ID NO: 6095258 - DNA, 25 bp, Homo sapien
cagacaattgggttgacggcagcct

SEQ ID NO: 6095259 - DNA, 25 bp, Homo sapien
tggccttgaagtagcgatgctcaaa

SEQ ID NO: 6095260 - DNA, 25 bp, Homo sapien
cagcttgccgtagacagcatgggta

SEQ ID NO: 6095261 - DNA, 25 bp, Homo sapien
ttcacaaacactcgccagtagcagg

SEQ ID NO: 6095262 - DNA, 25 bp, Homo sapien
gatactcgaagaggagcagcttgcc

SEQ ID NO: 6095263 - DNA, 25 bp, Homo sapien
tagcaggccacgatgtagggtgacc

SEQ ID NO: 6095264 - DNA, 25 bp, Homo sapien
cattctgccggatacccagcagggt

SEQ ID NO: 6095265 - DNA, 25 bp, Homo sapien
ctttgccgaagttgagtgcataccc

SEQ ID NO: 6095266 - DNA, 25 bp, Homo sapien
catacccggccatgcttgatgcaca

SEQ ID NO: 6095267 - DNA, 25 bp, Homo sapien
cggccatgcttgatgcacagaagta

SEQ ID NO: 6095268 - DNA, 25 bp, Homo sapien
cgaagttgagtgcatacccggccat

SEQ ID NO: 6095269 - DNA, 25 bp, Homo sapien
tgagtgcatacccggccatgcttga

SEQ ID NO: 6095270 - DNA, 25 bp, Homo sapien
caatgaagctatttcgactgccatc

SEQ ID NO: 6095271 - DNA, 25 bp, Homo sapien
ccatctcaatccgatgatgtgaggg

SEQ ID NO: 6095272 - DNA, 25 bp, Homo sapien
gaagactgttcctttccagtcgagc

SEQ ID NO: 6095273 - DNA, 25 bp, Homo sapien
ctttggcctaataaccctggattgg

SEQ ID NO: 6095274 - DNA, 25 bp, Homo sapien
cctggattggagcagacaattttta

SEQ ID NO: 6095275 - DNA, 25 bp, Homo sapien
ggttaagcaaagacagacctcactg

SEQ ID NO: 6095276 - DNA, 25 bp, Homo sapien
ggagcaagggctcgagaatccactt

SEQ ID NO: 6095277 - DNA, 25 bp, Homo sapien
tgtcagaactacatttgagccgcta

SEQ ID NO: 6095278 - DNA, 25 bp, Homo sapien
ccttgttgaaggacggtgctcagta

SEQ ID NO: 6095279 - DNA, 25 bp, Homo sapien
cggtgctcagtagagtccagtccac

SEQ ID NO: 6095280 - DNA, 25 bp, Homo sapien
agccgctattccctatgcccatgag

SEQ ID NO: 6095281 - DNA, 25 bp, Homo sapien
aaagccaccccgttgtactgttgct

SEQ ID NO: 6095282 - DNA, 25 bp, Homo sapien
ttccatggaaattggggaattgtat

SEQ ID NO: 6095283 - DNA, 25 bp, Homo sapien
acaagctacaagaaccccaatacta

SEQ ID NO: 6095284 - DNA, 25 bp, Homo sapien
tttccatggaaattggggaattgta

SEQ ID NO: 6095285 - DNA, 25 bp, Homo sapien
gactgagtagttcggtctgatctga

SEQ ID NO: 6095286 - DNA, 25 bp, Homo sapien
tagtacccagttgtaaccaggcagc

SEQ ID NO: 6095287 - DNA, 25 bp, Homo sapien
catttgaggcctaagtgtagagtgc

SEQ ID NO: 6095288 - DNA, 25 bp, Homo sapien
gatggttcccactgagaggttctgt

SEQ ID NO: 6095289 - DNA, 25 bp, Homo sapien
gtgtcacctgccagacagctgagtg

SEQ ID NO: 6095290 - DNA, 25 bp, Homo sapien
gccaacagcctagatgaagtcccag

SEQ ID NO: 6095291 - DNA, 25 bp, Homo sapien
ccacatggagaggtgtttggccaac

SEQ ID NO: 6095292 - DNA, 25 bp, Homo sapien
gaggttctgtgtccccttattctga

SEQ ID NO: 6095293 - DNA, 25 bp, Homo sapien
gaatctgggtgagcctgtgactaca

SEQ ID NO: 6095294 - DNA, 25 bp, Homo sapien
tcttgggatggtcgttcttgggacc

SEQ ID NO: 6095295 - DNA, 25 bp, Homo sapien
tccagatgatcctagtacccagttg

SEQ ID NO: 6095296 - DNA, 25 bp, Homo sapien
gagggattccttgagaaaaagggca

SEQ ID NO: 6095297 - DNA, 25 bp, Homo sapien
cctttgaattaaccgctaacacagc

SEQ ID NO: 6095298 - DNA, 25 bp, Homo sapien
ttaattggccagttaccgctaacac

SEQ ID NO: 6095299 - DNA, 25 bp, Homo sapien
gaaactgcttcaccatacttaccag

SEQ ID NO: 6095300 - DNA, 25 bp, Homo sapien
atgaagtcatcgcaccaaatgcacg

SEQ ID NO: 6095301 - DNA, 25 bp, Homo sapien
tgcggacgacattgtcgaaatttat

SEQ ID NO: 6095302 - DNA, 25 bp, Homo sapien
tgtcgaaatttatggcgggaataaa

SEQ ID NO: 6095303 - DNA, 25 bp, Homo sapien
acacagcagatagtgacctacattc

SEQ ID NO: 6095304 - DNA, 25 bp, Homo sapien
ccatcgcggctgatttagtgctttg

SEQ ID NO: 6095305 - DNA, 25 bp, Homo sapien
cggctgatttagtgctttgggaatc

SEQ ID NO: 6095306 - DNA, 25 bp, Homo sapien
aatatcatctttatcgtcgaaggtg

SEQ ID NO: 6095307 - DNA, 25 bp, Homo sapien
ccggttaatatcatctttatcgtcg

SEQ ID NO: 6095308 - DNA, 25 bp, Homo sapien
atttatggcgggaataaagggattg

SEQ ID NO: 6095309 - DNA, 25 bp, Homo sapien
cgacggcgccttggacattgtcagc

SEQ ID NO: 6095310 - DNA, 25 bp, Homo sapien
tggcaaaacatactaacaccatcgc

SEQ ID NO: 6095311 - DNA, 25 bp, Homo sapien
tttataaccactatgatgtccaacc

SEQ ID NO: 6095312 - DNA, 25 bp, Homo sapien
aatatttggcaaaacatactaacac

SEQ ID NO: 6095313 - DNA, 25 bp, Homo sapien
tattgccgtaccgtatttttatgat

SEQ ID NO: 6095314 - DNA, 25 bp, Homo sapien
gtcatcgcaccaaatgcacgtgaaa

SEQ ID NO: 6095315 - DNA, 25 bp, Homo sapien
taccagaatatttggcaaaacatac

SEQ ID NO: 6095316 - DNA, 25 bp, Homo sapien
gttgacgacgataaaggcaatttaa

SEQ ID NO: 6095317 - DNA, 25 bp, Homo sapien
aggcaatattgccgtaccgtatttt

SEQ ID NO: 6095318 - DNA, 25 bp, Homo sapien
ctgttgttgactcggctcctatccg

SEQ ID NO: 6095319 - DNA, 25 bp, Homo sapien
cacgggatggtaagctatatggccg

SEQ ID NO: 6095320 - DNA, 25 bp, Homo sapien
gacccttgtgatttataaccactat

SEQ ID NO: 6095321 - DNA, 25 bp, Homo sapien
gaaggtgccgaagaaactgcttcac

SEQ ID NO: 6095322 - DNA, 25 bp, Homo sapien
cgacattgtcgaaatttatggcggg

SEQ ID NO: 6095323 - DNA, 25 bp, Homo sapien
aagctttaattggccagttaccgct

SEQ ID NO: 6095324 - DNA, 25 bp, Homo sapien
catacttaccagaatatttggcaaa

SEQ ID NO: 6095325 - DNA, 25 bp, Homo sapien
tgtggacgacggcgccttggacatt

SEQ ID NO: 6095326 - DNA, 25 bp, Homo sapien
ggacattgtcagcacgggatggtaa

SEQ ID NO: 6095327 - DNA, 25 bp, Homo sapien
aatgcacgtgaaaaagctttaattg

SEQ ID NO: 6095328 - DNA, 25 bp, Homo sapien
aaccactatgatgtccaacccgccg

SEQ ID NO: 6095329 - DNA, 25 bp, Homo sapien
cttatcacaagccattgccgcatta

SEQ ID NO: 6095330 - DNA, 25 bp, Homo sapien
actgcgcgtctagcgcagttgccga

SEQ ID NO: 6095331 - DNA, 25 bp, Homo sapien
tggtggtaaaaatgcggacgacatt

SEQ ID NO: 6095332 - DNA, 25 bp, Homo sapien
aagctatatggccgcggtgttgacg

SEQ ID NO: 6095333 - DNA, 25 bp, Homo sapien
gacgataaaggcaatttaactgcgc

SEQ ID NO: 6095334 - DNA, 25 bp, Homo sapien
tgccgagtatttaaaagaaaatgac

SEQ ID NO: 6095335 - DNA, 25 bp, Homo sapien
atggcgggaataaagggattgtgac

SEQ ID NO: 6095336 - DNA, 25 bp, Homo sapien
gtctagcgcagttgccgagtattta

SEQ ID NO: 6095337 - DNA, 25 bp, Homo sapien
catcattgtcggctgttgttgactc

SEQ ID NO: 6095338 - DNA, 25 bp, Homo sapien
ttgtgacctttgaattaaccgctaa

SEQ ID NO: 6095339 - DNA, 25 bp, Homo sapien
ctaacaccatcgcggctgatttagt

SEQ ID NO: 6095340 - DNA, 25 bp, Homo sapien
ccaacaaggcaatattgccgtaccg

SEQ ID NO: 6095341 - DNA, 25 bp, Homo sapien
atcgtcgaaggtgccgaagaaactg

SEQ ID NO: 6095342 - DNA, 25 bp, Homo sapien
cgccttggacattgtcagcacggga

SEQ ID NO: 6095343 - DNA, 25 bp, Homo sapien
gcttcaccatacttaccagaatatt

SEQ ID NO: 6095344 - DNA, 25 bp, Homo sapien
atggtaagctatatggccgcggtgt

SEQ ID NO: 6095345 - DNA, 25 bp, Homo sapien
gccgaagaaactgcttcaccatact

SEQ ID NO: 6095346 - DNA, 25 bp, Homo sapien
tgctttgggaatctggtggtaaaaa

SEQ ID NO: 6095347 - DNA, 25 bp, Homo sapien
caaaccttaccggttaatatcatct

SEQ ID NO: 6095348 - DNA, 25 bp, Homo sapien
aaaggcaatttaactgcgcgtctag

SEQ ID NO: 6095349 - DNA, 25 bp, Homo sapien
cattgccgcattatttgaccaacaa

SEQ ID NO: 6095350 - DNA, 25 bp, Homo sapien
ttgacctgtggacgacggcgccttg

SEQ ID NO: 6095351 - DNA, 25 bp, Homo sapien
tgtcagcacgggatggtaagctata

SEQ ID NO: 6095352 - DNA, 25 bp, Homo sapien
cgtatttttatgatgaagtcatcgc

SEQ ID NO: 6095353 - DNA, 25 bp, Homo sapien
tacattcatcattgtcggctgttgt

SEQ ID NO: 6095354 - DNA, 25 bp, Homo sapien
ccgctaacacagcagatagtgacct

SEQ ID NO: 6095355 - DNA, 25 bp, Homo sapien
cgagaagatttagtggcacaacacg

SEQ ID NO: 6095356 - DNA, 25 bp, Homo sapien
ggctcctatccgcttatcacaagcc

SEQ ID NO: 6095357 - DNA, 25 bp, Homo sapien
aattaaccgctaacacagcagatag

SEQ ID NO: 6095358 - DNA, 25 bp, Homo sapien
ctaacacgagaagatttagtggcac

SEQ ID NO: 6095359 - DNA, 25 bp, Homo sapien
tatgatgtccaacccgccgaacccc

SEQ ID NO: 6095360 - DNA, 25 bp, Homo sapien
tatccgcttatcacaagccattgcc

SEQ ID NO: 6095361 - DNA, 25 bp, Homo sapien
tgtcggctgttgttgactcggctcc

SEQ ID NO: 6095362 - DNA, 25 bp, Homo sapien
acaagccattgccgcattatttgac

SEQ ID NO: 6095363 - DNA, 25 bp, Homo sapien
atttgaccaacaaggcaatattgcc

SEQ ID NO: 6095364 - DNA, 25 bp, Homo sapien
taaagggattgtgacctttgaatta

SEQ ID NO: 6095365 - DNA, 25 bp, Homo sapien
cgcagttgccgagtatttaaaagaa

SEQ ID NO: 6095366 - DNA, 25 bp, Homo sapien
ccttaccggttaatatcatctttat

SEQ ID NO: 6095367 - DNA, 25 bp, Homo sapien
ttgtgatttataaccactatgatgt

SEQ ID NO: 6095368 - DNA, 25 bp, Homo sapien
gatttagtggcacaacacggcctaa

SEQ ID NO: 6095369 - DNA, 25 bp, Homo sapien
ggaataaagggattgtgacctttga

SEQ ID NO: 6095370 - DNA, 25 bp, Homo sapien
atctttatcgtcgaaggtgccgaag

SEQ ID NO: 6095371 - DNA, 25 bp, Homo sapien
tgactcggctcctatccgcttatca

SEQ ID NO: 6095372 - DNA, 25 bp, Homo sapien
cagatagtgacctacattcatcatt

SEQ ID NO: 6095373 - DNA, 25 bp, Homo sapien
cgtgaaaaagctttaattggccagt

SEQ ID NO: 6095374 - DNA, 25 bp, Homo sapien
aacatactaacaccatcgcggctga

SEQ ID NO: 6095375 - DNA, 25 bp, Homo sapien
cgcggtgttgacgacgataaaggca

SEQ ID NO: 6095376 - DNA, 25 bp, Homo sapien
ggaatctggtggtaaaaatgcggac

SEQ ID NO: 6095377 - DNA, 25 bp, Homo sapien
taaaaatgcggacgacattgtcgaa

SEQ ID NO: 6095378 - DNA, 25 bp, Homo sapien
gtgacctacattcatcattgtcggc

SEQ ID NO: 6095379 - DNA, 25 bp, Homo sapien
ttaccgctaacacgagaagatttag

SEQ ID NO: 6095380 - DNA, 25 bp, Homo sapien
tttatgatgaagtcatcgcaccaaa

SEQ ID NO: 6095381 - DNA, 25 bp, Homo sapien
accccttgacctgtggacgacggcg

SEQ ID NO: 6095382 - DNA, 25 bp, Homo sapien
aatttaactgcgcgtctagcgcagt

SEQ ID NO: 6095383 - DNA, 25 bp, Homo sapien
gccgaaccccttgacctgtggacga

SEQ ID NO: 6095384 - DNA, 25 bp, Homo sapien
ccgtaccgtatttttatgatgaagt

SEQ ID NO: 6095385 - DNA, 25 bp, Homo sapien
tatggccgcggtgttgacgacgata

SEQ ID NO: 6095386 - DNA, 25 bp, Homo sapien
ggccagttaccgctaacacgagaag

SEQ ID NO: 6095387 - DNA, 25 bp, Homo sapien
gcaccaaatgcacgtgaaaaagctt

SEQ ID NO: 6095388 - DNA, 25 bp, Homo sapien
atttagtgctttgggaatctggtgg

SEQ ID NO: 6095389 - DNA, 25 bp, Homo sapien
cgcattatttgaccaacaaggcaat

SEQ ID NO: 6095390 - DNA, 25 bp, Homo sapien
tgcatgacatttgccagtaaaataa

SEQ ID NO: 6095391 - DNA, 25 bp, Homo sapien
aatattttgaacactcagatataaa

SEQ ID NO: 6095392 - DNA, 25 bp, Homo sapien
cctaatgcttactgcagtaactgta

SEQ ID NO: 6095393 - DNA, 25 bp, Homo sapien
tggtgcactttttcaggcattgtaa

SEQ ID NO: 6095394 - DNA, 25 bp, Homo sapien
ctgagttgctgaagacatcttactt

SEQ ID NO: 6095395 - DNA, 25 bp, Homo sapien
tgaatttctacttaacatccatgtg

SEQ ID NO: 6095396 - DNA, 25 bp, Homo sapien
tccatgtggtgcactttttcaggca

SEQ ID NO: 6095397 - DNA, 25 bp, Homo sapien
tataccaatagacaatactcaggct

SEQ ID NO: 6095398 - DNA, 25 bp, Homo sapien
gattacgttttagcattagtcagaa

SEQ ID NO: 6095399 - DNA, 25 bp, Homo sapien
atttatgcatggtattttctctccc

SEQ ID NO: 6095400 - DNA, 25 bp, Homo sapien
tattcacttcctaatgcttactgca

SEQ ID NO: 6095401 - DNA, 25 bp, Homo sapien
tattgttgcatgacatttgccagta

SEQ ID NO: 6095402 - DNA, 25 bp, Homo sapien
agtcctagggcctgcaaagtgcccc

SEQ ID NO: 6095403 - DNA, 25 bp, Homo sapien
gtcctagggcctgcaaagtgcccct

SEQ ID NO: 6095404 - DNA, 25 bp, Homo sapien
cctagggcctgcaaagtgcccctga

SEQ ID NO: 6095405 - DNA, 25 bp, Homo sapien
aagtcctagggcctgcaaagtgccc

SEQ ID NO: 6095406 - DNA, 25 bp, Homo sapien
tcctagggcctgcaaagtgcccctg

SEQ ID NO: 6095407 - DNA, 25 bp, Homo sapien
agaaatcaacgtggactgagcgccc

SEQ ID NO: 6095408 - DNA, 25 bp, Homo sapien
cgtgtggtaagtaaaattgctgctc

SEQ ID NO: 6095409 - DNA, 25 bp, Homo sapien
ggtccatcattttgtgcctgtaaga

SEQ ID NO: 6095410 - DNA, 25 bp, Homo sapien
tgagaggattcaggcaacaatggct

SEQ ID NO: 6095411 - DNA, 25 bp, Homo sapien
tggctaaatgcaaccgtctcagtca

SEQ ID NO: 6095412 - DNA, 25 bp, Homo sapien
tctcagtcacactgagggccagcct

SEQ ID NO: 6095413 - DNA, 25 bp, Homo sapien
tccatgcctgctcctttgtgattca

SEQ ID NO: 6095414 - DNA, 25 bp, Homo sapien
cactagtcagcatcaggttcaggaa

SEQ ID NO: 6095415 - DNA, 25 bp, Homo sapien
gtagacacaaggctttgggattccc

SEQ ID NO: 6095416 - DNA, 25 bp, Homo sapien
cacaattctcaacaacactctaggg

SEQ ID NO: 6095417 - DNA, 25 bp, Homo sapien
ccatacaggtggtaaaggtatcttc

SEQ ID NO: 6095418 - DNA, 25 bp, Homo sapien
gcatctccatcactcgtgtggtaag

SEQ ID NO: 6095419 - DNA, 25 bp, Homo sapien
tgtcataacccacaggtgtagaaac

SEQ ID NO: 6095420 - DNA, 25 bp, Homo sapien
ccacgatatacttgcagtcctcctt

SEQ ID NO: 6095421 - DNA, 25 bp, Homo sapien
tcacgaaggtggcaaagatcacaac

SEQ ID NO: 6095422 - DNA, 25 bp, Homo sapien
cctggaactccctcattaggtatga

SEQ ID NO: 6095423 - DNA, 25 bp, Homo sapien
gaaggtggcaaagatcacaacgctg

SEQ ID NO: 6095424 - DNA, 25 bp, Homo sapien
ggcaaagatcacaacgctgcccagg

SEQ ID NO: 6095425 - DNA, 25 bp, Homo sapien
catggctacacaatcattgactatt

SEQ ID NO: 6095426 - DNA, 25 bp, Homo sapien
acaatcattgactattagaggccag

SEQ ID NO: 6095427 - DNA, 25 bp, Homo sapien
aaagtcacgaaggtggcaaagatca

SEQ ID NO: 6095428 - DNA, 25 bp, Homo sapien
tctccaccacgatatacttgcagtc

SEQ ID NO: 6095429 - DNA, 25 bp, Homo sapien
gatcacaacgctgcccaggagaaca

SEQ ID NO: 6095430 - DNA, 25 bp, Homo sapien
ttaggtatgaaatagcatgatgcat

SEQ ID NO: 6095431 - DNA, 25 bp, Homo sapien
ccctgcaactggtggaaaactccta

SEQ ID NO: 6095432 - DNA, 25 bp, Homo sapien
ctgacagaaatgcttagaaaggagt

SEQ ID NO: 6095433 - DNA, 25 bp, Homo sapien
tctggacaccatggtagagctgctg

SEQ ID NO: 6095434 - DNA, 25 bp, Homo sapien
gggatccaattagcttcaatagcaa

SEQ ID NO: 6095435 - DNA, 25 bp, Homo sapien
gaatctaagtcttctccctgacaga

SEQ ID NO: 6095436 - DNA, 25 bp, Homo sapien
gtgaatccaagccacaaagctgagc

SEQ ID NO: 6095437 - DNA, 25 bp, Homo sapien
gctgttacagagaaactaagtgcca

SEQ ID NO: 6095438 - DNA, 25 bp, Homo sapien
tttatatggtgtgaatccaagccac

SEQ ID NO: 6095439 - DNA, 25 bp, Homo sapien
tgtggcattactctagactcaggga

SEQ ID NO: 6095440 - DNA, 25 bp, Homo sapien
taaaagggagcagcattgtggcatt

SEQ ID NO: 6095441 - DNA, 25 bp, Homo sapien
tcataacagaagtgcgcagaataca

SEQ ID NO: 6095442 - DNA, 25 bp, Homo sapien
gaaactaagtgccatggatctgtgg

SEQ ID NO: 6095443 - DNA, 25 bp, Homo sapien
tcagccgaagttagtacagtgtcca

SEQ ID NO: 6095444 - DNA, 25 bp, Homo sapien
gctggacgagcagtgcaaactcctt

SEQ ID NO: 6095445 - DNA, 25 bp, Homo sapien
taacgggcctcaactggctgggcat

SEQ ID NO: 6095446 - DNA, 25 bp, Homo sapien
ttcttctggtttactggtggcacaa

SEQ ID NO: 6095447 - DNA, 25 bp, Homo sapien
tactacgatttggtcctcagccgaa

SEQ ID NO: 6095448 - DNA, 25 bp, Homo sapien
gaaattcggttctcatccgactgac

SEQ ID NO: 6095449 - DNA, 25 bp, Homo sapien
tgagccacatctagtccagaaaagc

SEQ ID NO: 6095450 - DNA, 25 bp, Homo sapien
aaaagccttctgtgcgctggacgag

SEQ ID NO: 6095451 - DNA, 25 bp, Homo sapien
cgtttcatgaagtacctccgaaggg

SEQ ID NO: 6095452 - DNA, 25 bp, Homo sapien
gatatgctaggctgaatcttgcaga

SEQ ID NO: 6095453 - DNA, 25 bp, Homo sapien
taacaaaaatcaccgagggctggcg

SEQ ID NO: 6095454 - DNA, 25 bp, Homo sapien
tcaaagtcttgatatgtaacgggcc

SEQ ID NO: 6095455 - DNA, 25 bp, Homo sapien
gaacaagggtggtctaaatatccta

SEQ ID NO: 6095456 - DNA, 25 bp, Homo sapien
aattctcctcacagtatcttgcaga

SEQ ID NO: 6095457 - DNA, 25 bp, Homo sapien
cacacaaacactgacacactctggt

SEQ ID NO: 6095458 - DNA, 25 bp, Homo sapien
agtggtacagaggaaggaaacttga

SEQ ID NO: 6095459 - DNA, 25 bp, Homo sapien
tattactgatattgtccaaggaagc

SEQ ID NO: 6095460 - DNA, 25 bp, Homo sapien
tacttgatcttgtttcacgaagcgg

SEQ ID NO: 6095461 - DNA, 25 bp, Homo sapien
gaaaatctttgaacgtctcgaggca

SEQ ID NO: 6095462 - DNA, 25 bp, Homo sapien
ggtggtgaacttttgctgtcaattc

SEQ ID NO: 6095463 - DNA, 25 bp, Homo sapien
tgaacgtctcgaggcagatggttcc

SEQ ID NO: 6095464 - DNA, 25 bp, Homo sapien
gaaaagtcaatcaatgggcagtaaa

SEQ ID NO: 6095465 - DNA, 25 bp, Homo sapien
cttgagggtaaattcatcagtgaca

SEQ ID NO: 6095466 - DNA, 25 bp, Homo sapien
cagtaaataagagtaggtggtgaac

SEQ ID NO: 6095467 - DNA, 25 bp, Homo sapien
gcagtggatgccctaaccagatgga

SEQ ID NO: 6095468 - DNA, 25 bp, Homo sapien
gggagttgctttagaaacacccaga

SEQ ID NO: 6095469 - DNA, 25 bp, Homo sapien
atttttagcccttggtcaccacagc

SEQ ID NO: 6095470 - DNA, 25 bp, Homo sapien
ctggtggagtgcctcggcagaccct

SEQ ID NO: 6095471 - DNA, 25 bp, Homo sapien
ctcagctgaggtatagaggtgctaa

SEQ ID NO: 6095472 - DNA, 25 bp, Homo sapien
cttggcttgaagcttatcctggctg

SEQ ID NO: 6095473 - DNA, 25 bp, Homo sapien
ttccagtcctagtgaaacgggagag

SEQ ID NO: 6095474 - DNA, 25 bp, Homo sapien
tgccctaagggcatggactccagca

SEQ ID NO: 6095475 - DNA, 25 bp, Homo sapien
ggtgctaaagtcagtgggccaacag

SEQ ID NO: 6095476 - DNA, 25 bp, Homo sapien
cagaactcaagggtcagagagcaga

SEQ ID NO: 6095477 - DNA, 25 bp, Homo sapien
atttcaaggccggaggcaagtagag

SEQ ID NO: 6095478 - DNA, 25 bp, Homo sapien
cctaaccagatggacctcagcaggt

SEQ ID NO: 6095479 - DNA, 25 bp, Homo sapien
tgcaccaaattaagggttggcaagc

SEQ ID NO: 6095480 - DNA, 25 bp, Homo sapien
gggccaaatttagcccactagctat

SEQ ID NO: 6095481 - DNA, 25 bp, Homo sapien
cattggaaagggaaaagcaatctac

SEQ ID NO: 6095482 - DNA, 25 bp, Homo sapien
cagttgccattgatgaaacgtcaag

SEQ ID NO: 6095483 - DNA, 25 bp, Homo sapien
cacaaaagttttcatgaagcaatcc

SEQ ID NO: 6095484 - DNA, 25 bp, Homo sapien
attctgtcacccaggttagtgtgca

SEQ ID NO: 6095485 - DNA, 25 bp, Homo sapien
ggttggcaagctatcaccatgggcc

SEQ ID NO: 6095486 - DNA, 25 bp, Homo sapien
caatggtgcattcatagctcactgc

SEQ ID NO: 6095487 - DNA, 25 bp, Homo sapien
gggactacaggagtgcaacaccact

SEQ ID NO: 6095488 - DNA, 25 bp, Homo sapien
ggaaatggtcagaaatccacagtat

SEQ ID NO: 6095489 - DNA, 25 bp, Homo sapien
tctcaaactccagtctcaagtgatc

SEQ ID NO: 6095490 - DNA, 25 bp, Homo sapien
caggatctcgttataatgcccaggc

SEQ ID NO: 6095491 - DNA, 25 bp, Homo sapien
cttgttgatttgtgtaagcgtccta

SEQ ID NO: 6095492 - DNA, 25 bp, Homo sapien
gaggacttagccagcgttctttgcc

SEQ ID NO: 6095493 - DNA, 25 bp, Homo sapien
tgtttcctccgttggcagtttcttc

SEQ ID NO: 6095494 - DNA, 25 bp, Homo sapien
tagtttgacgtcttgcatttgagtc

SEQ ID NO: 6095495 - DNA, 25 bp, Homo sapien
atttgtgtaagcgtcctatagatgc

SEQ ID NO: 6095496 - DNA, 25 bp, Homo sapien
gttgatttgtgtaagcgtcctatag

SEQ ID NO: 6095497 - DNA, 25 bp, Homo sapien
gtgtaagcgtcctatagatgctgga

SEQ ID NO: 6095498 - DNA, 25 bp, Homo sapien
tctgtttcctccgttggcagtttct

SEQ ID NO: 6095499 - DNA, 25 bp, Homo sapien
tgtttatagtttgacgtcttgcatt

SEQ ID NO: 6095500 - DNA, 25 bp, Homo sapien
gacgttgtcttccaggatgtttata

SEQ ID NO: 6095501 - DNA, 25 bp, Homo sapien
tagccagcgttctttgccaacgcca

SEQ ID NO: 6095502 - DNA, 25 bp, Homo sapien
cttttgaggacttagccagcgttct

SEQ ID NO: 6095503 - DNA, 25 bp, Homo sapien
cattctgctcatctactcaatggaa

SEQ ID NO: 6095504 - DNA, 25 bp, Homo sapien
tgcagtggtgggagctcagctcact

SEQ ID NO: 6095505 - DNA, 25 bp, Homo sapien
ggcccatctgagcaaccccttgagt

SEQ ID NO: 6095506 - DNA, 25 bp, Homo sapien
tctggaactcccgacctgaagtgat

SEQ ID NO: 6095507 - DNA, 25 bp, Homo sapien
atttcaggcgtgagcccggctaatt

SEQ ID NO: 6095508 - DNA, 25 bp, Homo sapien
aaatacttcccgctgttgggccgcg

SEQ ID NO: 6095509 - DNA, 25 bp, Homo sapien
ggtttcattctgttggccagtctga

SEQ ID NO: 6095510 - DNA, 25 bp, Homo sapien
tgatcttgacatcctgacctcaggt

SEQ ID NO: 6095511 - DNA, 25 bp, Homo sapien
tcaatggaaaaaatacttcccgctg

SEQ ID NO: 6095512 - DNA, 25 bp, Homo sapien
ccatgttgaacaggctggtctggaa

SEQ ID NO: 6095513 - DNA, 25 bp, Homo sapien
tgagccacggcacccggcctaattt

SEQ ID NO: 6095514 - DNA, 25 bp, Homo sapien
gccacgcccggctaactttctgtat

SEQ ID NO: 6095515 - DNA, 25 bp, Homo sapien
gagggctttctatcagtcatcagtg

SEQ ID NO: 6095516 - DNA, 25 bp, Homo sapien
aactggaacgtgtaataatgaaggc

SEQ ID NO: 6095517 - DNA, 25 bp, Homo sapien
agcaggcaggaagctaatcagcgag

SEQ ID NO: 6095518 - DNA, 25 bp, Homo sapien
gctttagcgcctccaaattaaggac

SEQ ID NO: 6095519 - DNA, 25 bp, Homo sapien
caggacctctagctgttctgtaatg

SEQ ID NO: 6095520 - DNA, 25 bp, Homo sapien
gttatagcacttcgtccagcactga

SEQ ID NO: 6095521 - DNA, 25 bp, Homo sapien
tattttcaggacttcatgtagtgag

SEQ ID NO: 6095522 - DNA, 25 bp, Homo sapien
catgtagtgagtgggtaatcagagt

SEQ ID NO: 6095523 - DNA, 25 bp, Homo sapien
cagcgagacaaactggaacgtgtaa

SEQ ID NO: 6095524 - DNA, 25 bp, Homo sapien
tcaggtcaaatctcaatacttgcaa

SEQ ID NO: 6095525 - DNA, 25 bp, Homo sapien
gctaatcagcgaggagaaaatcgga

SEQ ID NO: 6095526 - DNA, 25 bp, Homo sapien
tgttgctggtggaaatcgtttttgc

SEQ ID NO: 6095527 - DNA, 25 bp, Homo sapien
ctgctcctgatgcttggaccccttt

SEQ ID NO: 6095528 - DNA, 25 bp, Homo sapien
attgggagcctttcttacaaccttg

SEQ ID NO: 6095529 - DNA, 25 bp, Homo sapien
gcttggaccccttttattgatcaga

SEQ ID NO: 6095530 - DNA, 25 bp, Homo sapien
ccttttattgatcagagtgctctag

SEQ ID NO: 6095531 - DNA, 25 bp, Homo sapien
cccaaaaagcagtatctaagtcaca

SEQ ID NO: 6095532 - DNA, 25 bp, Homo sapien
ggaccccttttattgatcagagtgc

SEQ ID NO: 6095533 - DNA, 25 bp, Homo sapien
acagggacagttaaattgggagcct

SEQ ID NO: 6095534 - DNA, 25 bp, Homo sapien
gctcctgatgcttggacccctttta

SEQ ID NO: 6095535 - DNA, 25 bp, Homo sapien
gagcctttcttacaaccttgatggg

SEQ ID NO: 6095536 - DNA, 25 bp, Homo sapien
gatcagagtgctctagaataatgga

SEQ ID NO: 6095537 - DNA, 25 bp, Homo sapien
gggagcctttcttacaaccttgatg

SEQ ID NO: 6095538 - DNA, 25 bp, Homo sapien
cttaacctcccaaaaagcagtatct

SEQ ID NO: 6095539 - DNA, 25 bp, Homo sapien
aaaacagacaggtgcggcctgactt

SEQ ID NO: 6095540 - DNA, 25 bp, Homo sapien
taacagccataatttaaactagaca

SEQ ID NO: 6095541 - DNA, 25 bp, Homo sapien
tctggaaggatttgtcggctaccct

SEQ ID NO: 6095542 - DNA, 25 bp, Homo sapien
cggtttacctctgacttgacttcaa

SEQ ID NO: 6095543 - DNA, 25 bp, Homo sapien
cagtatgggaacagctggagttaga

SEQ ID NO: 6095544 - DNA, 25 bp, Homo sapien
gatattttactccagcattcccttc

SEQ ID NO: 6095545 - DNA, 25 bp, Homo sapien
caggtgcggcctgacttcaagtgca

SEQ ID NO: 6095546 - DNA, 25 bp, Homo sapien
tgcttctgtaactgaccggtttacc

SEQ ID NO: 6095547 - DNA, 25 bp, Homo sapien
gccctgaagattgaccttttcaagt

SEQ ID NO: 6095548 - DNA, 25 bp, Homo sapien
gttctgggattacctgcctgagtca

SEQ ID NO: 6095549 - DNA, 25 bp, Homo sapien
taaactagacagtatgggaacagct

SEQ ID NO: 6095550 - DNA, 25 bp, Homo sapien
tgtcggctacccttccaaaaacaga

SEQ ID NO: 6095551 - DNA, 25 bp, Homo sapien
attgctttagccgtgaacccgcctg

SEQ ID NO: 6095552 - DNA, 25 bp, Homo sapien
aagagaagctccgtagaagttgaag

SEQ ID NO: 6095553 - DNA, 25 bp, Homo sapien
cagctctcggtaaagctcacgctaa

SEQ ID NO: 6095554 - DNA, 25 bp, Homo sapien
aacactcccgccaaagggacaagca

SEQ ID NO: 6095555 - DNA, 25 bp, Homo sapien
cactgacagggctaaggagcagacc

SEQ ID NO: 6095556 - DNA, 25 bp, Homo sapien
cgtcgcgctctgctcctgtgtacag

SEQ ID NO: 6095557 - DNA, 25 bp, Homo sapien
taaaatcttctaactcatcgagcac

SEQ ID NO: 6095558 - DNA, 25 bp, Homo sapien
tctctctgaacgattgctttagccg

SEQ ID NO: 6095559 - DNA, 25 bp, Homo sapien
tcttcatctagctccaaattgtcag

SEQ ID NO: 6095560 - DNA, 25 bp, Homo sapien
agaacttccggaccgcaggtgcgtg

SEQ ID NO: 6095561 - DNA, 25 bp, Homo sapien
ctacagttcgggtctatgaggaggc

SEQ ID NO: 6095562 - DNA, 25 bp, Homo sapien
gggacaagcatgcacgtccccactg

SEQ ID NO: 6095563 - DNA, 25 bp, Homo sapien
aagatcccggaggttctccaggtcg

SEQ ID NO: 6095564 - DNA, 25 bp, Homo sapien
ctggaaggcatactggtgaggatct

SEQ ID NO: 6095565 - DNA, 25 bp, Homo sapien
gaaatgtcattgatcctggtgacaa

SEQ ID NO: 6095566 - DNA, 25 bp, Homo sapien
cacctctgtggagtagcctgaagct

SEQ ID NO: 6095567 - DNA, 25 bp, Homo sapien
tcctggtgacaattgtcttgatgag

SEQ ID NO: 6095568 - DNA, 25 bp, Homo sapien
ggatcacgtttctggaaggcatact

SEQ ID NO: 6095569 - DNA, 25 bp, Homo sapien
gactttttggatgggcacagcttgg

SEQ ID NO: 6095570 - DNA, 25 bp, Homo sapien
gacatagaaaagatagggccaaagc

SEQ ID NO: 6095571 - DNA, 25 bp, Homo sapien
cttagagaaggccagcacgtgaaga

SEQ ID NO: 6095572 - DNA, 25 bp, Homo sapien
tggtccatcttggataaggtcagga

SEQ ID NO: 6095573 - DNA, 25 bp, Homo sapien
ccagcacgtgaagaagatcccggag

SEQ ID NO: 6095574 - DNA, 25 bp, Homo sapien
aaagccacaagaatccgcacagggt

SEQ ID NO: 6095575 - DNA, 25 bp, Homo sapien
tgcacgtaagagtgaaggatggtcc

SEQ ID NO: 6095576 - DNA, 25 bp, Homo sapien
gagcaatggtaatctcactctctgc

SEQ ID NO: 6095577 - DNA, 25 bp, Homo sapien
ttcgggcatcaaaatccttactaag

SEQ ID NO: 6095578 - DNA, 25 bp, Homo sapien
ggtgatacaccacaattcttttctt

SEQ ID NO: 6095579 - DNA, 25 bp, Homo sapien
gaaagagccgttttcttcactctgg

SEQ ID NO: 6095580 - DNA, 25 bp, Homo sapien
tgttgctcacctccaagtctacaaa

SEQ ID NO: 6095581 - DNA, 25 bp, Homo sapien
ctctggcatatcccctttgtgagaa

SEQ ID NO: 6095582 - DNA, 25 bp, Homo sapien
aaggatggtccagtcctgtcggtgc

SEQ ID NO: 6095583 - DNA, 25 bp, Homo sapien
tcatcggcgttgaggtgcacgtaag

SEQ ID NO: 6095584 - DNA, 25 bp, Homo sapien
tccaagtctacaaatccagcgacgt

SEQ ID NO: 6095585 - DNA, 25 bp, Homo sapien
aactgcaatataactctccatcatt

SEQ ID NO: 6095586 - DNA, 25 bp, Homo sapien
ggcctttcgggcatcaaaatcctta

SEQ ID NO: 6095587 - DNA, 25 bp, Homo sapien
ctggtataacgtggctcctctgaat

SEQ ID NO: 6095588 - DNA, 25 bp, Homo sapien
ggacttgaaccaattagctgacccc

SEQ ID NO: 6095589 - DNA, 25 bp, Homo sapien
atggtgcctaggttggtaaaagatt

SEQ ID NO: 6095590 - DNA, 25 bp, Homo sapien
cctggtataacgtggctcctctgaa

SEQ ID NO: 6095591 - DNA, 25 bp, Homo sapien
gacttgaaccaattagctgacccca

SEQ ID NO: 6095592 - DNA, 25 bp, Homo sapien
ttttgtgcaggtttgcccatttgcc

SEQ ID NO: 6095593 - DNA, 25 bp, Homo sapien
gcaggacttgaaccaattagctgac

SEQ ID NO: 6095594 - DNA, 25 bp, Homo sapien
tcttttgtgcaggtttgcccatttg

SEQ ID NO: 6095595 - DNA, 25 bp, Homo sapien
caggacttgaaccaattagctgacc

SEQ ID NO: 6095596 - DNA, 25 bp, Homo sapien
tgcaggacttgaaccaattagctga

SEQ ID NO: 6095597 - DNA, 25 bp, Homo sapien
tctgcaggacttgaaccaattagct

SEQ ID NO: 6095598 - DNA, 25 bp, Homo sapien
tttgtgcaggtttgcccatttgcca

SEQ ID NO: 6095599 - DNA, 25 bp, Homo sapien
tgaacatctgcgatgacgccaaagg

SEQ ID NO: 6095600 - DNA, 25 bp, Homo sapien
catacactgctcgtattttggagaa

SEQ ID NO: 6095601 - DNA, 25 bp, Homo sapien
ccctgtaagtgaagaagactatgtc

SEQ ID NO: 6095602 - DNA, 25 bp, Homo sapien
gagaaaagacgctctgaactgtcac

SEQ ID NO: 6095603 - DNA, 25 bp, Homo sapien
ggtttccccatgtatgatgaactgg

SEQ ID NO: 6095604 - DNA, 25 bp, Homo sapien
tatgtctgtagtatcgccgcctggt

SEQ ID NO: 6095605 - DNA, 25 bp, Homo sapien
ccatcgatgatatctccaagctgaa

SEQ ID NO: 6095606 - DNA, 25 bp, Homo sapien
aacatgtccataacaagttctaggg

SEQ ID NO: 6095607 - DNA, 25 bp, Homo sapien
ggcatggtctcaggatgatgtacaa

SEQ ID NO: 6095608 - DNA, 25 bp, Homo sapien
tgatgaactggaactttaagcctct

SEQ ID NO: 6095609 - DNA, 25 bp, Homo sapien
tttggagaagactgatccacgccca

SEQ ID NO: 6095610 - DNA, 25 bp, Homo sapien
tgaaggacacaacagggcatgctgc

SEQ ID NO: 6095611 - DNA, 25 bp, Homo sapien
tattccagttccgtaatttggattg

SEQ ID NO: 6095612 - DNA, 25 bp, Homo sapien
attccagttccgtaatttggattgt

SEQ ID NO: 6095613 - DNA, 25 bp, Homo sapien
tagggtgggcaagcccaactaccta

SEQ ID NO: 6095614 - DNA, 25 bp, Homo sapien
gaggccttctaaccttgccaaacca

SEQ ID NO: 6095615 - DNA, 25 bp, Homo sapien
ttccaaacccatgacaagtgccacg

SEQ ID NO: 6095616 - DNA, 25 bp, Homo sapien
gggtactcctaagcagctagctgtt

SEQ ID NO: 6095617 - DNA, 25 bp, Homo sapien
tacaaaagcaaactagggtgggcaa

SEQ ID NO: 6095618 - DNA, 25 bp, Homo sapien
cagctagctgttggcgagatcttac

SEQ ID NO: 6095619 - DNA, 25 bp, Homo sapien
ctgcagatggctgggtcttccaaac

SEQ ID NO: 6095620 - DNA, 25 bp, Homo sapien
aagcctgatcggctaacgcagcttc

SEQ ID NO: 6095621 - DNA, 25 bp, Homo sapien
gccaaaccactacaaaagcaaacta

SEQ ID NO: 6095622 - DNA, 25 bp, Homo sapien
gatcggctaacgcagcttcctggtt

SEQ ID NO: 6095623 - DNA, 25 bp, Homo sapien
agaggccgaggccttctaaccttgc

SEQ ID NO: 6095624 - DNA, 25 bp, Homo sapien
ccaactacctaaggcaggaagaaag

SEQ ID NO: 6095625 - DNA, 25 bp, Homo sapien
gaagtatgggaccataaaccctgca

SEQ ID NO: 6095626 - DNA, 25 bp, Homo sapien
tagatacatatagcagagaccccag

SEQ ID NO: 6095627 - DNA, 25 bp, Homo sapien
tgctgccggccactgtgtttctcat

SEQ ID NO: 6095628 - DNA, 25 bp, Homo sapien
gaaaatctgtatagccagtgtatct

SEQ ID NO: 6095629 - DNA, 25 bp, Homo sapien
ctaaaattaagatgagagagtgtcc

SEQ ID NO: 6095630 - DNA, 25 bp, Homo sapien
cctgcatatttgctatggaaaacac

SEQ ID NO: 6095631 - DNA, 25 bp, Homo sapien
tagaaaacgccgagccatgtggcaa

SEQ ID NO: 6095632 - DNA, 25 bp, Homo sapien
aaagatgaaccttctgatgtgaaac

SEQ ID NO: 6095633 - DNA, 25 bp, Homo sapien
taagcaatggcactgagaactcagc

SEQ ID NO: 6095634 - DNA, 25 bp, Homo sapien
tgtccagaagggtatataccaatca

SEQ ID NO: 6095635 - DNA, 25 bp, Homo sapien
ccaggatcatccatgggaccagctt

SEQ ID NO: 6095636 - DNA, 25 bp, Homo sapien
gacaggatagacagcaacgcgctga

SEQ ID NO: 6095637 - DNA, 25 bp, Homo sapien
cattcattacaggtttatgtctcca

SEQ ID NO: 6095638 - DNA, 25 bp, Homo sapien
gcattactcactgctatttaaggag

SEQ ID NO: 6095639 - DNA, 25 bp, Homo sapien
taagctgaccagtattataaaagga

SEQ ID NO: 6095640 - DNA, 25 bp, Homo sapien
taaccgtcaaagtgcacaggcacct

SEQ ID NO: 6095641 - DNA, 25 bp, Homo sapien
gtctccatatctctttggtgcaatg

SEQ ID NO: 6095642 - DNA, 25 bp, Homo sapien
taactaaattccacaggataggatc

SEQ ID NO: 6095643 - DNA, 25 bp, Homo sapien
tcgcgataatccctacatggtggca

SEQ ID NO: 6095644 - DNA, 25 bp, Homo sapien
gcaatgacaacacgtctagtgctcg

SEQ ID NO: 6095645 - DNA, 25 bp, Homo sapien
taagtgtaaggtcaaccactcgcga

SEQ ID NO: 6095646 - DNA, 25 bp, Homo sapien
tctagtgctcgctatggcccgatat

SEQ ID NO: 6095647 - DNA, 25 bp, Homo sapien
ctgtgggttaccctcacaggcaatg

SEQ ID NO: 6095648 - DNA, 25 bp, Homo sapien
tggataagtggccagctacactgga

SEQ ID NO: 6095649 - DNA, 25 bp, Homo sapien
tttcagcctaagctgtgccatgttg

SEQ ID NO: 6095650 - DNA, 25 bp, Homo sapien
aagaaaatagctctctgctacagag

SEQ ID NO: 6095651 - DNA, 25 bp, Homo sapien
aagagtgaggttaacagcaggaagt

SEQ ID NO: 6095652 - DNA, 25 bp, Homo sapien
tctgctgaggactcatttgccctca

SEQ ID NO: 6095653 - DNA, 25 bp, Homo sapien
ggttgtcgacccacggtgaaatgca

SEQ ID NO: 6095654 - DNA, 25 bp, Homo sapien
ttttattatgcaggcgggttttcag

SEQ ID NO: 6095655 - DNA, 25 bp, Homo sapien
cgacccacggtgaaatgcagaaggt

SEQ ID NO: 6095656 - DNA, 25 bp, Homo sapien
tgtgcaatgttccagcttgcttacc

SEQ ID NO: 6095657 - DNA, 25 bp, Homo sapien
tctgatctacgtagggcacaaaaag

SEQ ID NO: 6095658 - DNA, 25 bp, Homo sapien
catgttgcccacttctttcttactg

SEQ ID NO: 6095659 - DNA, 25 bp, Homo sapien
gaaagttgtgtctgatctacgtagg

SEQ ID NO: 6095660 - DNA, 25 bp, Homo sapien
tatgcaggcgggttttcagcctaag

SEQ ID NO: 6095661 - DNA, 25 bp, Homo sapien
gctgcttaatgaaggtagcttaacc

SEQ ID NO: 6095662 - DNA, 25 bp, Homo sapien
ctgggctggttttaatgataaacaa

SEQ ID NO: 6095663 - DNA, 25 bp, Homo sapien
caaaatagtaatcttcctcaggacc

SEQ ID NO: 6095664 - DNA, 25 bp, Homo sapien
gggcaacagcccatgaatagcctag

SEQ ID NO: 6095665 - DNA, 25 bp, Homo sapien
tgcaggtttacacatccctgggctg

SEQ ID NO: 6095666 - DNA, 25 bp, Homo sapien
gaagcggtcatgctgcttaatgaag

SEQ ID NO: 6095667 - DNA, 25 bp, Homo sapien
ttctccagatgcaggtttacacatc

SEQ ID NO: 6095668 - DNA, 25 bp, Homo sapien
tgacagggcctaaatgcggcagcag

SEQ ID NO: 6095669 - DNA, 25 bp, Homo sapien
attcatcgcatcttttggaataaca

SEQ ID NO: 6095670 - DNA, 25 bp, Homo sapien
cccagggagggtatttatagtccag

SEQ ID NO: 6095671 - DNA, 25 bp, Homo sapien
ctcatagaagagtccttctgggaac

SEQ ID NO: 6095672 - DNA, 25 bp, Homo sapien
cagcccatgaatagcctagttctgg

SEQ ID NO: 6095673 - DNA, 25 bp, Homo sapien
tttcaggactaagataacgtgtggc

SEQ ID NO: 6095674 - DNA, 25 bp, Homo sapien
agatgtaaggcttgcccacggaccc

SEQ ID NO: 6095675 - DNA, 25 bp, Homo sapien
cagctctggcagatgtaaggcttgc

SEQ ID NO: 6095676 - DNA, 25 bp, Homo sapien
gcaggtctcaggcataccatctcaa

SEQ ID NO: 6095677 - DNA, 25 bp, Homo sapien
tgatacacatcacggaagatcttgc

SEQ ID NO: 6095678 - DNA, 25 bp, Homo sapien
aggacatgcggtcttttctcttgaa

SEQ ID NO: 6095679 - DNA, 25 bp, Homo sapien
cagtagggcacacttagcgtcaaaa

SEQ ID NO: 6095680 - DNA, 25 bp, Homo sapien
gatcttgccgcagatctcacaagcc

SEQ ID NO: 6095681 - DNA, 25 bp, Homo sapien
tcatgggaccgcacatggtaggaca

SEQ ID NO: 6095682 - DNA, 25 bp, Homo sapien
cctggcatggttctataaggtcaaa

SEQ ID NO: 6095683 - DNA, 25 bp, Homo sapien
ggagagacagtagggcacacttagc

SEQ ID NO: 6095684 - DNA, 25 bp, Homo sapien
aacactctacccaaacctggcatgg

SEQ ID NO: 6095685 - DNA, 25 bp, Homo sapien
gaagtcattgcacatgacagtgatg

SEQ ID NO: 6095686 - DNA, 25 bp, Homo sapien
ccttactcagcttgaacttgtcgcc

SEQ ID NO: 6095687 - DNA, 25 bp, Homo sapien
tactcagcttgaacttgtcgccctc

SEQ ID NO: 6095688 - DNA, 25 bp, Homo sapien
aagaagtcattgcacatgacagtga

SEQ ID NO: 6095689 - DNA, 25 bp, Homo sapien
ggcatcaacagtcctgggcccaaga

SEQ ID NO: 6095690 - DNA, 25 bp, Homo sapien
ccccttactcagcttgaacttgtcg

SEQ ID NO: 6095691 - DNA, 25 bp, Homo sapien
aaggcatcaacagtcctgggcccaa

SEQ ID NO: 6095692 - DNA, 25 bp, Homo sapien
gaacttgtcgccctcttggcaggag

SEQ ID NO: 6095693 - DNA, 25 bp, Homo sapien
gcagctccttgtgcagaagttcctt

SEQ ID NO: 6095694 - DNA, 25 bp, Homo sapien
gctccttgtgcagaagttccttcat

SEQ ID NO: 6095695 - DNA, 25 bp, Homo sapien
caaaggcatcaacagtcctgggccc

SEQ ID NO: 6095696 - DNA, 25 bp, Homo sapien
cagcttgaacttgtcgccctcttgg

SEQ ID NO: 6095697 - DNA, 25 bp, Homo sapien
tcatgcctattatggacctctcagc

SEQ ID NO: 6095698 - DNA, 25 bp, Homo sapien
tttgtgaaacatgtcgatcatgcct

SEQ ID NO: 6095699 - DNA, 25 bp, Homo sapien
ggacctctcagcttgagtgttgctc

SEQ ID NO: 6095700 - DNA, 25 bp, Homo sapien
tgtgaaacatgtcgatcatgcctat

SEQ ID NO: 6095701 - DNA, 25 bp, Homo sapien
ggaagttctccttcatcatcgtcag

SEQ ID NO: 6095702 - DNA, 25 bp, Homo sapien
tcgatcatgcctattatggacctct

SEQ ID NO: 6095703 - DNA, 25 bp, Homo sapien
aacatgtcgatcatgcctattatgg

SEQ ID NO: 6095704 - DNA, 25 bp, Homo sapien
tgtcgatcatgcctattatggacct

SEQ ID NO: 6095705 - DNA, 25 bp, Homo sapien
gatcatgcctattatggacctctca

SEQ ID NO: 6095706 - DNA, 25 bp, Homo sapien
gtatttgtgaaacatgtcgatcatg

SEQ ID NO: 6095707 - DNA, 25 bp, Homo sapien
catgtcgatcatgcctattatggac

SEQ ID NO: 6095708 - DNA, 25 bp, Homo sapien
aagttctccttcatcatcgtcagca

SEQ ID NO: 6095709 - DNA, 25 bp, Homo sapien
tgagacagttcatcctgctccgccg

SEQ ID NO: 6095710 - DNA, 25 bp, Homo sapien
tgctcatcgtgtcttccatttgctg

SEQ ID NO: 6095711 - DNA, 25 bp, Homo sapien
tggtgagcgtcgtcgtgctgctcat

SEQ ID NO: 6095712 - DNA, 25 bp, Homo sapien
tccatgttgaggtcgaggcccgcct

SEQ ID NO: 6095713 - DNA, 25 bp, Homo sapien
ctttagaatccagctaagagtgcag

SEQ ID NO: 6095714 - DNA, 25 bp, Homo sapien
ggtatagtatctctctaacacacag

SEQ ID NO: 6095715 - DNA, 25 bp, Homo sapien
cagttttgaccagatcttcgagaaa

SEQ ID NO: 6095716 - DNA, 25 bp, Homo sapien
gccaggaaacctcagagcgggttct

SEQ ID NO: 6095717 - DNA, 25 bp, Homo sapien
aagggcatttcagcattctggcgtg

SEQ ID NO: 6095718 - DNA, 25 bp, Homo sapien
tcctggagcagcatatccacttggt

SEQ ID NO: 6095719 - DNA, 25 bp, Homo sapien
catttcaaagggtggctatggccag

SEQ ID NO: 6095720 - DNA, 25 bp, Homo sapien
taccatcattacgagctatacagaa

SEQ ID NO: 6095721 - DNA, 25 bp, Homo sapien
cgtcgagcacttgccgatctgttcc

SEQ ID NO: 6095722 - DNA, 25 bp, Homo sapien
cgcgtcgagcacttgccgatctgtt

SEQ ID NO: 6095723 - DNA, 25 bp, Homo sapien
tttcggccacgcgtcgagcacttgc

SEQ ID NO: 6095724 - DNA, 25 bp, Homo sapien
ttcggcagcattttcggccacgcgt

SEQ ID NO: 6095725 - DNA, 25 bp, Homo sapien
agcattttcggccacgcgtcgagca

SEQ ID NO: 6095726 - DNA, 25 bp, Homo sapien
gagcacttgccgatctgttcctcct

SEQ ID NO: 6095727 - DNA, 25 bp, Homo sapien
accggccgcctctgactctgcaata

SEQ ID NO: 6095728 - DNA, 25 bp, Homo sapien
ggccacgcgtcgagcacttgccgat

SEQ ID NO: 6095729 - DNA, 25 bp, Homo sapien
cattttcggccacgcgtcgagcact

SEQ ID NO: 6095730 - DNA, 25 bp, Homo sapien
ttctgtaatgtgtttatgattcctc

SEQ ID NO: 6095731 - DNA, 25 bp, Homo sapien
cggcagcattttcggccacgcgtcg

SEQ ID NO: 6095732 - DNA, 25 bp, Homo sapien
cacgcgtcgagcacttgccgatctg

SEQ ID NO: 6095733 - DNA, 25 bp, Homo sapien
tgcaggattctcgaactggtggtgc

SEQ ID NO: 6095734 - DNA, 25 bp, Homo sapien
tgttccagtggaatcaccagtatag

SEQ ID NO: 6095735 - DNA, 25 bp, Homo sapien
taaatgaccttcgtctcgccttggt

SEQ ID NO: 6095736 - DNA, 25 bp, Homo sapien
tttgaggtctttaaatgccatcgtc

SEQ ID NO: 6095737 - DNA, 25 bp, Homo sapien
cggtcaagggcatacagagggctct

SEQ ID NO: 6095738 - DNA, 25 bp, Homo sapien
gaacataggagcttctagattggtg

SEQ ID NO: 6095739 - DNA, 25 bp, Homo sapien
tggctactgctttgcggtcaagggc

SEQ ID NO: 6095740 - DNA, 25 bp, Homo sapien
tcgccttggtgtccgacgtgcagga

SEQ ID NO: 6095741 - DNA, 25 bp, Homo sapien
tctgtatagcggagaagttgggctc

SEQ ID NO: 6095742 - DNA, 25 bp, Homo sapien
tgctgacaatggcaactgcactaaa

SEQ ID NO: 6095743 - DNA, 25 bp, Homo sapien
ccctatattcatgtgtggcggaagt

SEQ ID NO: 6095744 - DNA, 25 bp, Homo sapien
cctatggccccagagaatttctcgg

SEQ ID NO: 6095745 - DNA, 25 bp, Homo sapien
cgattccctgcgcaagatttgcgac

SEQ ID NO: 6095746 - DNA, 25 bp, Homo sapien
gcatttactgaaaccggctaaatca

SEQ ID NO: 6095747 - DNA, 25 bp, Homo sapien
acaatggatcgcgtcggtacccgct

SEQ ID NO: 6095748 - DNA, 25 bp, Homo sapien
ttccgcctgaatcactgctaccgct

SEQ ID NO: 6095749 - DNA, 25 bp, Homo sapien
agcgtgtcgatcttccatacaatgg

SEQ ID NO: 6095750 - DNA, 25 bp, Homo sapien
aagattgtcgccgtcgtggaaacca

SEQ ID NO: 6095751 - DNA, 25 bp, Homo sapien
attcggaagtgctacaggaatcggt

SEQ ID NO: 6095752 - DNA, 25 bp, Homo sapien
cagcgggccagcgcctccagcctga

SEQ ID NO: 6095753 - DNA, 25 bp, Homo sapien
aatatcaataatgcggtaatggcgc

SEQ ID NO: 6095754 - DNA, 25 bp, Homo sapien
ggatcgcgtcggtacccgctatgtt

SEQ ID NO: 6095755 - DNA, 25 bp, Homo sapien
agtggcgtgggcaatatcaataatg

SEQ ID NO: 6095756 - DNA, 25 bp, Homo sapien
gcactggcaccggatggtcgagtct

SEQ ID NO: 6095757 - DNA, 25 bp, Homo sapien
ccgcggcgcaatagcgtgtcgatct

SEQ ID NO: 6095758 - DNA, 25 bp, Homo sapien
tgatgcattcggaagtgctacagga

SEQ ID NO: 6095759 - DNA, 25 bp, Homo sapien
gtctggttaaccagcgggatcggta

SEQ ID NO: 6095760 - DNA, 25 bp, Homo sapien
tatgctggataaccaaaatcccatg

SEQ ID NO: 6095761 - DNA, 25 bp, Homo sapien
gatccgcccgttccagaactggcgg

SEQ ID NO: 6095762 - DNA, 25 bp, Homo sapien
tttcgtcattgaagcatcggcactg

SEQ ID NO: 6095763 - DNA, 25 bp, Homo sapien
gggaagaaagtgatcattgattcaa

SEQ ID NO: 6095764 - DNA, 25 bp, Homo sapien
cgcaatagcgtgtcgatcttccata

SEQ ID NO: 6095765 - DNA, 25 bp, Homo sapien
ggatattgtgattcctgtcgcgcca

SEQ ID NO: 6095766 - DNA, 25 bp, Homo sapien
gcagattgccgatgacgtggtcacg

SEQ ID NO: 6095767 - DNA, 25 bp, Homo sapien
cgtcggtacccgctatgttcaaatc

SEQ ID NO: 6095768 - DNA, 25 bp, Homo sapien
tcgatcttccatacaatggatcgcg

SEQ ID NO: 6095769 - DNA, 25 bp, Homo sapien
cggtaatatgctggataaccaaaat

SEQ ID NO: 6095770 - DNA, 25 bp, Homo sapien
aagtgctacaggaatcggtggtgca

SEQ ID NO: 6095771 - DNA, 25 bp, Homo sapien
atcggtaatgcgccgacctggctac

SEQ ID NO: 6095772 - DNA, 25 bp, Homo sapien
tcattgaagcatcggcactggcacc

SEQ ID NO: 6095773 - DNA, 25 bp, Homo sapien
gaaagtgatcattgattcaatcact

SEQ ID NO: 6095774 - DNA, 25 bp, Homo sapien
ccaaaatcccatgtgccagcagatt

SEQ ID NO: 6095775 - DNA, 25 bp, Homo sapien
tgtgattcctgtcgcgccaccgcgg

SEQ ID NO: 6095776 - DNA, 25 bp, Homo sapien
ctgaatcactgctaccgctccaaag

SEQ ID NO: 6095777 - DNA, 25 bp, Homo sapien
aatcactatcacgatccgcccgttc

SEQ ID NO: 6095778 - DNA, 25 bp, Homo sapien
aatgcgccgacctggctactccggg

SEQ ID NO: 6095779 - DNA, 25 bp, Homo sapien
ccagaactggcggatattgtgattc

SEQ ID NO: 6095780 - DNA, 25 bp, Homo sapien
ctacaggaatcggtggtgcatttac

SEQ ID NO: 6095781 - DNA, 25 bp, Homo sapien
actggcggatattgtgattcctgtc

SEQ ID NO: 6095782 - DNA, 25 bp, Homo sapien
cctgtcgcgccaccgcggcgcaata

SEQ ID NO: 6095783 - DNA, 25 bp, Homo sapien
cggatggtcgagtctggttaaccag

SEQ ID NO: 6095784 - DNA, 25 bp, Homo sapien
accggctaaatcagcgggccagcgc

SEQ ID NO: 6095785 - DNA, 25 bp, Homo sapien
agcgggatcggtaatgcgccgacct

SEQ ID NO: 6095786 - DNA, 25 bp, Homo sapien
tggcaccggatggtcgagtctggtt

SEQ ID NO: 6095787 - DNA, 25 bp, Homo sapien
ggtaattcctccgtttatgatgcat

SEQ ID NO: 6095788 - DNA, 25 bp, Homo sapien
agcctgacaatctcggccgattccc

SEQ ID NO: 6095789 - DNA, 25 bp, Homo sapien
tcactgctaccgctccaaagtggcg

SEQ ID NO: 6095790 - DNA, 25 bp, Homo sapien
gtgggcaatatcaataatgcggtaa

SEQ ID NO: 6095791 - DNA, 25 bp, Homo sapien
tgccgatgacgtggtcacgttctta

SEQ ID NO: 6095792 - DNA, 25 bp, Homo sapien
ttaaccagcgggatcggtaatgcgc

SEQ ID NO: 6095793 - DNA, 25 bp, Homo sapien
gcctccagcctgacaatctcggccg

SEQ ID NO: 6095794 - DNA, 25 bp, Homo sapien
tcggatccgaaaaagattgtcgccg

SEQ ID NO: 6095795 - DNA, 25 bp, Homo sapien
ggtcacgttcttatcacaggaaatg

SEQ ID NO: 6095796 - DNA, 25 bp, Homo sapien
tgacgtggtcacgttcttatcacag

SEQ ID NO: 6095797 - DNA, 25 bp, Homo sapien
taaatcagcgggccagcgcctccag

SEQ ID NO: 6095798 - DNA, 25 bp, Homo sapien
ctaccgctccaaagtggcgtgggca

SEQ ID NO: 6095799 - DNA, 25 bp, Homo sapien
gcgccaccgcggcgcaatagcgtgt

SEQ ID NO: 6095800 - DNA, 25 bp, Homo sapien
agcatcggcactggcaccggatggt

SEQ ID NO: 6095801 - DNA, 25 bp, Homo sapien
tatcacgatccgcccgttccagaac

SEQ ID NO: 6095802 - DNA, 25 bp, Homo sapien
cccgttccagaactggcggatattg

SEQ ID NO: 6095803 - DNA, 25 bp, Homo sapien
gtcgagtctggttaaccagcgggat

SEQ ID NO: 6095804 - DNA, 25 bp, Homo sapien
cgcatgggcgtattccgcctgaatc

SEQ ID NO: 6095805 - DNA, 25 bp, Homo sapien
gtgccagcagattgccgatgacgtg

SEQ ID NO: 6095806 - DNA, 25 bp, Homo sapien
gccagcgcctccagcctgacaatct

SEQ ID NO: 6095807 - DNA, 25 bp, Homo sapien
ggataaccaaaatcccatgtgccag

SEQ ID NO: 6095808 - DNA, 25 bp, Homo sapien
gctactccgggggaagaaagtgatc

SEQ ID NO: 6095809 - DNA, 25 bp, Homo sapien
tgattcaatcactatcacgatccgc

SEQ ID NO: 6095810 - DNA, 25 bp, Homo sapien
tgtcgccgtcgtggaaaccaactta

SEQ ID NO: 6095811 - DNA, 25 bp, Homo sapien
ctccgggggaagaaagtgatcattg

SEQ ID NO: 6095812 - DNA, 25 bp, Homo sapien
ttcaaatcggatccgaaaaagattg

SEQ ID NO: 6095813 - DNA, 25 bp, Homo sapien
ccgaaaaagattgtcgccgtcgtgg

SEQ ID NO: 6095814 - DNA, 25 bp, Homo sapien
cgacgccggtaatatgctggataac

SEQ ID NO: 6095815 - DNA, 25 bp, Homo sapien
actgaaaccggctaaatcagcgggc

SEQ ID NO: 6095816 - DNA, 25 bp, Homo sapien
gttcttatcacaggaaatggcgcat

SEQ ID NO: 6095817 - DNA, 25 bp, Homo sapien
tcccatgtgccagcagattgccgat

SEQ ID NO: 6095818 - DNA, 25 bp, Homo sapien
cctgcgcaagatttgcgacaatatg

SEQ ID NO: 6095819 - DNA, 25 bp, Homo sapien
acaatctcggccgattccctgcgca

SEQ ID NO: 6095820 - DNA, 25 bp, Homo sapien
ggtggtgcatttactgaaaccggct

SEQ ID NO: 6095821 - DNA, 25 bp, Homo sapien
ggcgtattccgcctgaatcactgct

SEQ ID NO: 6095822 - DNA, 25 bp, Homo sapien
cttacccgacgccggtaatatgctg

SEQ ID NO: 6095823 - DNA, 25 bp, Homo sapien
gctatgttcaaatcggatccgaaaa

SEQ ID NO: 6095824 - DNA, 25 bp, Homo sapien
atcacaggaaatggcgcatgggcgt

SEQ ID NO: 6095825 - DNA, 25 bp, Homo sapien
gtacccgctatgttcaaatcggatc

SEQ ID NO: 6095826 - DNA, 25 bp, Homo sapien
ttcctccgtttatgatgcattcgga

SEQ ID NO: 6095827 - DNA, 25 bp, Homo sapien
ctccaaagtggcgtgggcaatatca

SEQ ID NO: 6095828 - DNA, 25 bp, Homo sapien
gatcattgattcaatcactatcacg

SEQ ID NO: 6095829 - DNA, 25 bp, Homo sapien
gaaatggcgcatgggcgtattccgc

SEQ ID NO: 6095830 - DNA, 25 bp, Homo sapien
tcggccgattccctgcgcaagattt

SEQ ID NO: 6095831 - DNA, 25 bp, Homo sapien
ggaatcggtggtgcatttactgaaa

SEQ ID NO: 6095832 - DNA, 25 bp, Homo sapien
aataatgcggtaatggcgcgtctgg

SEQ ID NO: 6095833 - DNA, 25 bp, Homo sapien
cgtttatgatgcattcggaagtgct

SEQ ID NO: 6095834 - DNA, 25 bp, Homo sapien
ttccatacaatggatcgcgtcggta

SEQ ID NO: 6095835 - DNA, 25 bp, Homo sapien
tcagacggcggcacgggcttcttct

SEQ ID NO: 6095836 - DNA, 25 bp, Homo sapien
cagaattagaggagttgttctcact

SEQ ID NO: 6095837 - DNA, 25 bp, Homo sapien
ctcagacggcggcacgggcttcttc

SEQ ID NO: 6095838 - DNA, 25 bp, Homo sapien
tttctcaactgtgatcacttctgtg

SEQ ID NO: 6095839 - DNA, 25 bp, Homo sapien
caaacagcagtatagacttgccctc

SEQ ID NO: 6095840 - DNA, 25 bp, Homo sapien
ccagctccgttgctgtctaagcttt

SEQ ID NO: 6095841 - DNA, 25 bp, Homo sapien
gaattagaggagttgttctcactct

SEQ ID NO: 6095842 - DNA, 25 bp, Homo sapien
cggcggcacgggcttcttctcgctg

SEQ ID NO: 6095843 - DNA, 25 bp, Homo sapien
aggctctcttcccttgcgtttatct

SEQ ID NO: 6095844 - DNA, 25 bp, Homo sapien
tctccagctccgttgctgtctaagc

SEQ ID NO: 6095845 - DNA, 25 bp, Homo sapien
ggggcttcaggaagtgcctcttgca

SEQ ID NO: 6095846 - DNA, 25 bp, Homo sapien
tagaggagttgttctcactcttctc

SEQ ID NO: 6095847 - DNA, 25 bp, Homo sapien
tctgtgggtccagtcggggaccacc

SEQ ID NO: 6095848 - DNA, 25 bp, Homo sapien
tgtgggtccagtcggggaccacctc

SEQ ID NO: 6095849 - DNA, 25 bp, Homo sapien
ttctgtgggtccagtcggggaccac

SEQ ID NO: 6095850 - DNA, 25 bp, Homo sapien
tttctgtgggtccagtcggggacca

SEQ ID NO: 6095851 - DNA, 25 bp, Homo sapien
tccacttcagtaggtcagtgttgct

SEQ ID NO: 6095852 - DNA, 25 bp, Homo sapien
ggcacactcgggtttatggaccctc

SEQ ID NO: 6095853 - DNA, 25 bp, Homo sapien
gcagaagaccagctcaatacatgtg

SEQ ID NO: 6095854 - DNA, 25 bp, Homo sapien
gagaaatacttaaatgcagaagacc

SEQ ID NO: 6095855 - DNA, 25 bp, Homo sapien
tctccttaacagctgaggcagtgat

SEQ ID NO: 6095856 - DNA, 25 bp, Homo sapien
tactctcgggagtcaagcatgggaa

SEQ ID NO: 6095857 - DNA, 25 bp, Homo sapien
caacatacattaagtcgtgaatcag

SEQ ID NO: 6095858 - DNA, 25 bp, Homo sapien
cttacgtcaatgatgggtgctgcac

SEQ ID NO: 6095859 - DNA, 25 bp, Homo sapien
taacaccagaagtgatgggttgtgg

SEQ ID NO: 6095860 - DNA, 25 bp, Homo sapien
cactggacaagacagccgcttacgt

SEQ ID NO: 6095861 - DNA, 25 bp, Homo sapien
tgcactgccagtactctcgggagtc

SEQ ID NO: 6095862 - DNA, 25 bp, Homo sapien
gggatacagacccatcaccttccta

SEQ ID NO: 6095863 - DNA, 25 bp, Homo sapien
ttgacacaggtctccttaacagctg

SEQ ID NO: 6095864 - DNA, 25 bp, Homo sapien
tgctaggtagccgagagttctctgc

SEQ ID NO: 6095865 - DNA, 25 bp, Homo sapien
tctgggatctaggtgtctgaagcag

SEQ ID NO: 6095866 - DNA, 25 bp, Homo sapien
tctgtacaaagagtcaccttcgtat

SEQ ID NO: 6095867 - DNA, 25 bp, Homo sapien
atgcatatgcgcctgagttctggga

SEQ ID NO: 6095868 - DNA, 25 bp, Homo sapien
ccgtcaaaacgtgaagagcaccatt

SEQ ID NO: 6095869 - DNA, 25 bp, Homo sapien
tctaatcagtccctagctgttgctg

SEQ ID NO: 6095870 - DNA, 25 bp, Homo sapien
tgtaaaagaagatatacccagagtg

SEQ ID NO: 6095871 - DNA, 25 bp, Homo sapien
tcattctgagtgaagtacaggattc

SEQ ID NO: 6095872 - DNA, 25 bp, Homo sapien
ccctgcctgtgtgctaggtagccga

SEQ ID NO: 6095873 - DNA, 25 bp, Homo sapien
gagcaccattctaatcttgcaggga

SEQ ID NO: 6095874 - DNA, 25 bp, Homo sapien
ctagaatctccatctgattgctggc

SEQ ID NO: 6095875 - DNA, 25 bp, Homo sapien
catcagttggtctagagagtgaccc

SEQ ID NO: 6095876 - DNA, 25 bp, Homo sapien
catgacgcccacgatgatggtgagg

SEQ ID NO: 6095877 - DNA, 25 bp, Homo sapien
tatttcctgagcatgctgactaaac

SEQ ID NO: 6095878 - DNA, 25 bp, Homo sapien
ttcgaagtcaacgtcgcggccgcca

SEQ ID NO: 6095879 - DNA, 25 bp, Homo sapien
cccctcgttgatgtggtcgtagata

SEQ ID NO: 6095880 - DNA, 25 bp, Homo sapien
tttcttgccaacagcgaatggtggt

SEQ ID NO: 6095881 - DNA, 25 bp, Homo sapien
cgaaggcgcgctcgaagaacatgac

SEQ ID NO: 6095882 - DNA, 25 bp, Homo sapien
cgaatggtggtccatgaagagtacc

SEQ ID NO: 6095883 - DNA, 25 bp, Homo sapien
cgaagaacatgacgcccacgatgat

SEQ ID NO: 6095884 - DNA, 25 bp, Homo sapien
catgaagagtaccttgagcatcatc

SEQ ID NO: 6095885 - DNA, 25 bp, Homo sapien
tgatgtggtcgtagatagcgtccgc

SEQ ID NO: 6095886 - DNA, 25 bp, Homo sapien
tagcgtccgcgccttgatcgaaggc

SEQ ID NO: 6095887 - DNA, 25 bp, Homo sapien
tggtcgtagatagcgtccgcgcctt

SEQ ID NO: 6095888 - DNA, 25 bp, Homo sapien
agctcctatttaacttctgaatcag

SEQ ID NO: 6095889 - DNA, 25 bp, Homo sapien
taaaatattcttagcccgaacacca

SEQ ID NO: 6095890 - DNA, 25 bp, Homo sapien
gcatccctgtgctggagtttatttt

SEQ ID NO: 6095891 - DNA, 25 bp, Homo sapien
gcagtggttgtaattaagtccacaa

SEQ ID NO: 6095892 - DNA, 25 bp, Homo sapien
cagtgcaagcagttgcggtctcaat

SEQ ID NO: 6095893 - DNA, 25 bp, Homo sapien
aatacagcattgaatcattacagtg

SEQ ID NO: 6095894 - DNA, 25 bp, Homo sapien
aaaacaacgccccagttatcacagt

SEQ ID NO: 6095895 - DNA, 25 bp, Homo sapien
ctctttggagactgacacatttgca

SEQ ID NO: 6095896 - DNA, 25 bp, Homo sapien
ttcggaatcaactcaggcatgcaca

SEQ ID NO: 6095897 - DNA, 25 bp, Homo sapien
caggcaaagaataagtgacaatata

SEQ ID NO: 6095898 - DNA, 25 bp, Homo sapien
tccataacaaaagaagctacacaaa

SEQ ID NO: 6095899 - DNA, 25 bp, Homo sapien
cagttgcggtctcaatagtgaaaac

SEQ ID NO: 6095900 - DNA, 25 bp, Homo sapien
tttgggtgataacacaattagttga

SEQ ID NO: 6095901 - DNA, 25 bp, Homo sapien
aaggccagaggctagacttggatta

SEQ ID NO: 6095902 - DNA, 25 bp, Homo sapien
cttagatagccgtcttattttacgt

SEQ ID NO: 6095903 - DNA, 25 bp, Homo sapien
ttgagccataccgttcaactttttg

SEQ ID NO: 6095904 - DNA, 25 bp, Homo sapien
atgggataggggatgctaacaccgc

SEQ ID NO: 6095905 - DNA, 25 bp, Homo sapien
ttggattaaccccttttgcagcgga

SEQ ID NO: 6095906 - DNA, 25 bp, Homo sapien
tcgggtgtggtttgagccataccgt

SEQ ID NO: 6095907 - DNA, 25 bp, Homo sapien
aaacaaagacaaggtaaatatcagc

SEQ ID NO: 6095908 - DNA, 25 bp, Homo sapien
tgaagaacctcaaagcgaaagccat

SEQ ID NO: 6095909 - DNA, 25 bp, Homo sapien
ccttttgcagcggactgtaagcatc

SEQ ID NO: 6095910 - DNA, 25 bp, Homo sapien
ctgatgcaacgatgaacactgtcaa

SEQ ID NO: 6095911 - DNA, 25 bp, Homo sapien
tctgcatgcttgttggcggtcgggt

SEQ ID NO: 6095912 - DNA, 25 bp, Homo sapien
acctcaaagcgaaagccattgtgtt

SEQ ID NO: 6095913 - DNA, 25 bp, Homo sapien
agttggtgctcgtggagatgggata

SEQ ID NO: 6095914 - DNA, 25 bp, Homo sapien
tagacttggattaaccccttttgca

SEQ ID NO: 6095915 - DNA, 25 bp, Homo sapien
tggactcaagctacttgccactgtg

SEQ ID NO: 6095916 - DNA, 25 bp, Homo sapien
atcttaaacatgttaagacacaagt

SEQ ID NO: 6095917 - DNA, 25 bp, Homo sapien
cataccgttcaactttttgactcct

SEQ ID NO: 6095918 - DNA, 25 bp, Homo sapien
tgtggtttgagccataccgttcaac

SEQ ID NO: 6095919 - DNA, 25 bp, Homo sapien
atgttattgctgcatccactgatgc

SEQ ID NO: 6095920 - DNA, 25 bp, Homo sapien
aacatgttaagacacaagtatacaa

SEQ ID NO: 6095921 - DNA, 25 bp, Homo sapien
taagcatctgcatgcttgttggcgg

SEQ ID NO: 6095922 - DNA, 25 bp, Homo sapien
ccactgtgccacatgttattgctgc

SEQ ID NO: 6095923 - DNA, 25 bp, Homo sapien
ttaaccccttttgcagcggactgta

SEQ ID NO: 6095924 - DNA, 25 bp, Homo sapien
aatgatgtcgttattccccacttca

SEQ ID NO: 6095925 - DNA, 25 bp, Homo sapien
tgccacatgttattgctgcatccac

SEQ ID NO: 6095926 - DNA, 25 bp, Homo sapien
agccatcaagacaaacaaagacaag

SEQ ID NO: 6095927 - DNA, 25 bp, Homo sapien
atacgaaaccatactcttcaggcaa

SEQ ID NO: 6095928 - DNA, 25 bp, Homo sapien
caagctacttgccactgtgccacat

SEQ ID NO: 6095929 - DNA, 25 bp, Homo sapien
ttacgtatacgaaaccatactcttc

SEQ ID NO: 6095930 - DNA, 25 bp, Homo sapien
agcatgtgaagaacctcaaagcgaa

SEQ ID NO: 6095931 - DNA, 25 bp, Homo sapien
actcttcaggcaaatgatgtcgtta

SEQ ID NO: 6095932 - DNA, 25 bp, Homo sapien
ctttttgactcctgcacagcacgga

SEQ ID NO: 6095933 - DNA, 25 bp, Homo sapien
aaccatactcttcaggcaaatgatg

SEQ ID NO: 6095934 - DNA, 25 bp, Homo sapien
agacaaggtaaatatcagcttagat

SEQ ID NO: 6095935 - DNA, 25 bp, Homo sapien
catccactgatgcaacgatgaacac

SEQ ID NO: 6095936 - DNA, 25 bp, Homo sapien
tacgcttgtgttttcggacgcgtgg

SEQ ID NO: 6095937 - DNA, 25 bp, Homo sapien
acccttcgataggtagcctagacat

SEQ ID NO: 6095938 - DNA, 25 bp, Homo sapien
caagacaaacaaagacaaggtaaat

SEQ ID NO: 6095939 - DNA, 25 bp, Homo sapien
tgataacacaattagttgagttttg

SEQ ID NO: 6095940 - DNA, 25 bp, Homo sapien
tgcacagcacggaggtggcaccacc

SEQ ID NO: 6095941 - DNA, 25 bp, Homo sapien
tgaacactgtcaaaacaaagcatgt

SEQ ID NO: 6095942 - DNA, 25 bp, Homo sapien
tgctcgtggagatgggataggggat

SEQ ID NO: 6095943 - DNA, 25 bp, Homo sapien
acataacaaagcaaaagattacaaa

SEQ ID NO: 6095944 - DNA, 25 bp, Homo sapien
tagacatggactcaagctacttgcc

SEQ ID NO: 6095945 - DNA, 25 bp, Homo sapien
ttgctgcatccactgatgcaacgat

SEQ ID NO: 6095946 - DNA, 25 bp, Homo sapien
tgcttgttggcggtcgggtgtggtt

SEQ ID NO: 6095947 - DNA, 25 bp, Homo sapien
caacgatgaacactgtcaaaacaaa

SEQ ID NO: 6095948 - DNA, 25 bp, Homo sapien
tggcggtcgggtgtggtttgagcca

SEQ ID NO: 6095949 - DNA, 25 bp, Homo sapien
aaacaaagcatgtgaagaacctcaa

SEQ ID NO: 6095950 - DNA, 25 bp, Homo sapien
tggcaccaccccacccttcgatagg

SEQ ID NO: 6095951 - DNA, 25 bp, Homo sapien
ggactgtaagcatctgcatgcttgt

SEQ ID NO: 6095952 - DNA, 25 bp, Homo sapien
tgatggtggcgcagttggtgctcgt

SEQ ID NO: 6095953 - DNA, 25 bp, Homo sapien
ttgtgtttgctcttctcttttgggt

SEQ ID NO: 6095954 - DNA, 25 bp, Homo sapien
tgcagcggactgtaagcatctgcat

SEQ ID NO: 6095955 - DNA, 25 bp, Homo sapien
taggggatgctaacaccgcactttc

SEQ ID NO: 6095956 - DNA, 25 bp, Homo sapien
tccaggaaggccagaggctagactt

SEQ ID NO: 6095957 - DNA, 25 bp, Homo sapien
atgctaacaccgcactttccaggaa

SEQ ID NO: 6095958 - DNA, 25 bp, Homo sapien
ctgtcaaaacaaagcatgtgaagaa

SEQ ID NO: 6095959 - DNA, 25 bp, Homo sapien
caaagcaaaagattacaaagccatc

SEQ ID NO: 6095960 - DNA, 25 bp, Homo sapien
aagcgaaagccattgtgtttgctct

SEQ ID NO: 6095961 - DNA, 25 bp, Homo sapien
tgagttttgttttctacgcttgtgt

SEQ ID NO: 6095962 - DNA, 25 bp, Homo sapien
gtagcctagacatggactcaagcta

SEQ ID NO: 6095963 - DNA, 25 bp, Homo sapien
agaggctagacttggattaacccct

SEQ ID NO: 6095964 - DNA, 25 bp, Homo sapien
cacaagtatacaacataacaaagca

SEQ ID NO: 6095965 - DNA, 25 bp, Homo sapien
tacttgccactgtgccacatgttat

SEQ ID NO: 6095966 - DNA, 25 bp, Homo sapien
gaggtggcaccaccccacccttcga

SEQ ID NO: 6095967 - DNA, 25 bp, Homo sapien
tagccgtcttattttacgtatacga

SEQ ID NO: 6095968 - DNA, 25 bp, Homo sapien
ccacttcacttgatggtggcgcagt

SEQ ID NO: 6095969 - DNA, 25 bp, Homo sapien
gtcgttattccccacttcacttgat

SEQ ID NO: 6095970 - DNA, 25 bp, Homo sapien
tatatattatcatatcttaaacatg

SEQ ID NO: 6095971 - DNA, 25 bp, Homo sapien
tattccccacttcacttgatggtgg

SEQ ID NO: 6095972 - DNA, 25 bp, Homo sapien
ttctcttttgggtgataacacaatt

SEQ ID NO: 6095973 - DNA, 25 bp, Homo sapien
tatcagcttagatagccgtcttatt

SEQ ID NO: 6095974 - DNA, 25 bp, Homo sapien
tggcgcagttggtgctcgtggagat

SEQ ID NO: 6095975 - DNA, 25 bp, Homo sapien
aacaccgcactttccaggaaggcca

SEQ ID NO: 6095976 - DNA, 25 bp, Homo sapien
ttaagacacaagtatacaacataac

SEQ ID NO: 6095977 - DNA, 25 bp, Homo sapien
gcactttccaggaaggccagaggct

SEQ ID NO: 6095978 - DNA, 25 bp, Homo sapien
caggcaaatgatgtcgttattcccc

SEQ ID NO: 6095979 - DNA, 25 bp, Homo sapien
tggagatgggataggggatgctaac

SEQ ID NO: 6095980 - DNA, 25 bp, Homo sapien
gttcaactttttgactcctgcacag

SEQ ID NO: 6095981 - DNA, 25 bp, Homo sapien
tgttttctacgcttgtgttttcgga

SEQ ID NO: 6095982 - DNA, 25 bp, Homo sapien
ttacaaagccatcaagacaaacaaa

SEQ ID NO: 6095983 - DNA, 25 bp, Homo sapien
caccccacccttcgataggtagcct

SEQ ID NO: 6095984 - DNA, 25 bp, Homo sapien
tatacaacataacaaagcaaaagat

SEQ ID NO: 6095985 - DNA, 25 bp, Homo sapien
tatcatatcttaaacatgttaagac

SEQ ID NO: 6095986 - DNA, 25 bp, Homo sapien
aaaagattacaaagccatcaagaca

SEQ ID NO: 6095987 - DNA, 25 bp, Homo sapien
ggtaaatatcagcttagatagccgt

SEQ ID NO: 6095988 - DNA, 25 bp, Homo sapien
ttcacttgatggtggcgcagttggt

SEQ ID NO: 6095989 - DNA, 25 bp, Homo sapien
gactcctgcacagcacggaggtggc

SEQ ID NO: 6095990 - DNA, 25 bp, Homo sapien
aagccattgtgtttgctcttctctt

SEQ ID NO: 6095991 - DNA, 25 bp, Homo sapien
cgataggtagcctagacatggactc

SEQ ID NO: 6095992 - DNA, 25 bp, Homo sapien
ttgctcttctcttttgggtgataac

SEQ ID NO: 6095993 - DNA, 25 bp, Homo sapien
cacaattagttgagttttgttttct

SEQ ID NO: 6095994 - DNA, 25 bp, Homo sapien
agtcacgtaggataagcaagggtaa

SEQ ID NO: 6095995 - DNA, 25 bp, Homo sapien
taagattttctgcttgtctcactgg

SEQ ID NO: 6095996 - DNA, 25 bp, Homo sapien
ggtccgccctgagtcacgtaggata

SEQ ID NO: 6095997 - DNA, 25 bp, Homo sapien
caagaaccaggcacacggctaataa

SEQ ID NO: 6095998 - DNA, 25 bp, Homo sapien
attttggatggttctaggagagaga

SEQ ID NO: 6095999 - DNA, 25 bp, Homo sapien
ccaggcacacggctaataagagaga

SEQ ID NO: 6096000 - DNA, 25 bp, Homo sapien
acacggctaataagagagatctcat

SEQ ID NO: 6096001 - DNA, 25 bp, Homo sapien
ctcttgagtgttgtgagaccgttgc

SEQ ID NO: 6096002 - DNA, 25 bp, Homo sapien
ttcctttaagattttctgcttgtct

SEQ ID NO: 6096003 - DNA, 25 bp, Homo sapien
caacgacagaccccctgacggtcca

SEQ ID NO: 6096004 - DNA, 25 bp, Homo sapien
gctgatattagaacattcaaaatga

SEQ ID NO: 6096005 - DNA, 25 bp, Homo sapien
cctcatttattaattattaggttat

SEQ ID NO: 6096006 - DNA, 25 bp, Homo sapien
cgcagtgtaaagcaagaaccaggca

SEQ ID NO: 6096007 - DNA, 25 bp, Homo sapien
ttgatgcaacgacagaccccctgac

SEQ ID NO: 6096008 - DNA, 25 bp, Homo sapien
gcctgactcttgagtgttgtgagac

SEQ ID NO: 6096009 - DNA, 25 bp, Homo sapien
gtgagaccgttgcagcagagggttg

SEQ ID NO: 6096010 - DNA, 25 bp, Homo sapien
agagtgagtcctccaatagcagatt

SEQ ID NO: 6096011 - DNA, 25 bp, Homo sapien
cggtccacagaagtttgagcctgac

SEQ ID NO: 6096012 - DNA, 25 bp, Homo sapien
gaacttgtaagggagatcgacacca

SEQ ID NO: 6096013 - DNA, 25 bp, Homo sapien
agtcctccaatagcagatttgatgc

SEQ ID NO: 6096014 - DNA, 25 bp, Homo sapien
agtgttgtgagaccgttgcagcaga

SEQ ID NO: 6096015 - DNA, 25 bp, Homo sapien
ccctgacggtccacagaagtttgag

SEQ ID NO: 6096016 - DNA, 25 bp, Homo sapien
aagggctgaacttgtaagggagatc

SEQ ID NO: 6096017 - DNA, 25 bp, Homo sapien
tttctgcttgtctcactggatactg

SEQ ID NO: 6096018 - DNA, 25 bp, Homo sapien
caaagcattttggatggttctagga

SEQ ID NO: 6096019 - DNA, 25 bp, Homo sapien
caattccaaagcattttggatggtt

SEQ ID NO: 6096020 - DNA, 25 bp, Homo sapien
tatagttcttgtagtagcttccttt

SEQ ID NO: 6096021 - DNA, 25 bp, Homo sapien
gtgttgcaagacacggctgcttcac

SEQ ID NO: 6096022 - DNA, 25 bp, Homo sapien
acgtaggataagcaagggtaaagat

SEQ ID NO: 6096023 - DNA, 25 bp, Homo sapien
taaagatccgcaatcaccgtgttgc

SEQ ID NO: 6096024 - DNA, 25 bp, Homo sapien
atactgtcgcagtcagtggaagggc

SEQ ID NO: 6096025 - DNA, 25 bp, Homo sapien
gtaagggagatcgacaccacattta

SEQ ID NO: 6096026 - DNA, 25 bp, Homo sapien
tcttgtagtagcttcctttaagatt

SEQ ID NO: 6096027 - DNA, 25 bp, Homo sapien
attagaacattcaaaatgacaatac

SEQ ID NO: 6096028 - DNA, 25 bp, Homo sapien
agagagagtgagtcctccaatagca

SEQ ID NO: 6096029 - DNA, 25 bp, Homo sapien
agaaggcaattccaaagcattttgg

SEQ ID NO: 6096030 - DNA, 25 bp, Homo sapien
catcactgatcaattagcaactagc

SEQ ID NO: 6096031 - DNA, 25 bp, Homo sapien
gtttgagcctgactcttgagtgttg

SEQ ID NO: 6096032 - DNA, 25 bp, Homo sapien
cagcagagggttgggaccggtccgc

SEQ ID NO: 6096033 - DNA, 25 bp, Homo sapien
ccaatagcagatttgatgcaacgac

SEQ ID NO: 6096034 - DNA, 25 bp, Homo sapien
ctaataagagagatctcatgttact

SEQ ID NO: 6096035 - DNA, 25 bp, Homo sapien
tccgcaatcaccgtgttgcaagaca

SEQ ID NO: 6096036 - DNA, 25 bp, Homo sapien
atctcatgttactttctgttttttt

SEQ ID NO: 6096037 - DNA, 25 bp, Homo sapien
atcaccgtgttgcaagacacggctg

SEQ ID NO: 6096038 - DNA, 25 bp, Homo sapien
ccgttgcagcagagggttgggaccg

SEQ ID NO: 6096039 - DNA, 25 bp, Homo sapien
ggttattatagttcttgtagtagct

SEQ ID NO: 6096040 - DNA, 25 bp, Homo sapien
tattaggttattatagttcttgtag

SEQ ID NO: 6096041 - DNA, 25 bp, Homo sapien
atggttctaggagagagagtgagtc

SEQ ID NO: 6096042 - DNA, 25 bp, Homo sapien
cagaccccctgacggtccacagaag

SEQ ID NO: 6096043 - DNA, 25 bp, Homo sapien
gaccggtccgccctgagtcacgtag

SEQ ID NO: 6096044 - DNA, 25 bp, Homo sapien
acagaagtttgagcctgactcttga

SEQ ID NO: 6096045 - DNA, 25 bp, Homo sapien
gcagatttgatgcaacgacagaccc

SEQ ID NO: 6096046 - DNA, 25 bp, Homo sapien
caagacacggctgcttcaccgcagt

SEQ ID NO: 6096047 - DNA, 25 bp, Homo sapien
caagggtaaagatccgcaatcaccg

SEQ ID NO: 6096048 - DNA, 25 bp, Homo sapien
tcactggatactgtcgcagtcagtg

SEQ ID NO: 6096049 - DNA, 25 bp, Homo sapien
gagatcgacaccacatttagaaggc

SEQ ID NO: 6096050 - DNA, 25 bp, Homo sapien
aactagcaaaccaatgccctcattt

SEQ ID NO: 6096051 - DNA, 25 bp, Homo sapien
acatttagaaggcaattccaaagca

SEQ ID NO: 6096052 - DNA, 25 bp, Homo sapien
gacaccacatttagaaggcaattcc

SEQ ID NO: 6096053 - DNA, 25 bp, Homo sapien
tcgcagtcagtggaagggctgaact

SEQ ID NO: 6096054 - DNA, 25 bp, Homo sapien
aaaatgacaatacatcactgatcaa

SEQ ID NO: 6096055 - DNA, 25 bp, Homo sapien
caatgccctcatttattaattatta

SEQ ID NO: 6096056 - DNA, 25 bp, Homo sapien
agagagatctcatgttactttctgt

SEQ ID NO: 6096057 - DNA, 25 bp, Homo sapien
gataagcaagggtaaagatccgcaa

SEQ ID NO: 6096058 - DNA, 25 bp, Homo sapien
attagcaactagcaaaccaatgccc

SEQ ID NO: 6096059 - DNA, 25 bp, Homo sapien
cttgtctcactggatactgtcgcag

SEQ ID NO: 6096060 - DNA, 25 bp, Homo sapien
cttcaccgcagtgtaaagcaagaac

SEQ ID NO: 6096061 - DNA, 25 bp, Homo sapien
agtagcttcctttaagattttctgc

SEQ ID NO: 6096062 - DNA, 25 bp, Homo sapien
gtaaagcaagaaccaggcacacggc

SEQ ID NO: 6096063 - DNA, 25 bp, Homo sapien
tgatcaattagcaactagcaaacca

SEQ ID NO: 6096064 - DNA, 25 bp, Homo sapien
gttgggaccggtccgccctgagtca

SEQ ID NO: 6096065 - DNA, 25 bp, Homo sapien
acaatacatcactgatcaattagca

SEQ ID NO: 6096066 - DNA, 25 bp, Homo sapien
acattcaaaatgacaatacatcact

SEQ ID NO: 6096067 - DNA, 25 bp, Homo sapien
tcagtggaagggctgaacttgtaag

SEQ ID NO: 6096068 - DNA, 25 bp, Homo sapien
acggctgcttcaccgcagtgtaaag

SEQ ID NO: 6096069 - DNA, 25 bp, Homo sapien
caaaccaatgccctcatttattaat

SEQ ID NO: 6096070 - DNA, 25 bp, Homo sapien
tttccatatccataaaagagagttg

SEQ ID NO: 6096071 - DNA, 25 bp, Homo sapien
ttagaaaatttgtccacatttggga

SEQ ID NO: 6096072 - DNA, 25 bp, Homo sapien
tcataagcccgtttcccatcatcga

SEQ ID NO: 6096073 - DNA, 25 bp, Homo sapien
tccagataaagaccctacaaaccta

SEQ ID NO: 6096074 - DNA, 25 bp, Homo sapien
aaacggcgagttgtgaccataagcc

SEQ ID NO: 6096075 - DNA, 25 bp, Homo sapien
gagcaacattgtgattgacgataag

SEQ ID NO: 6096076 - DNA, 25 bp, Homo sapien
cgataagccttttatgttgtccggg

SEQ ID NO: 6096077 - DNA, 25 bp, Homo sapien
tatccataaaagagagttgcccata

SEQ ID NO: 6096078 - DNA, 25 bp, Homo sapien
acatgaaattacagagtagttgtct

SEQ ID NO: 6096079 - DNA, 25 bp, Homo sapien
tgaacaaagggcgtttatggcgtgt

SEQ ID NO: 6096080 - DNA, 25 bp, Homo sapien
agagtagttgtcttataacccttag

SEQ ID NO: 6096081 - DNA, 25 bp, Homo sapien
ttcccagttcgagccatgattatag

SEQ ID NO: 6096082 - DNA, 25 bp, Homo sapien
agccatgattatagctgccacagca

SEQ ID NO: 6096083 - DNA, 25 bp, Homo sapien
gaatatttccatatccataaaagag

SEQ ID NO: 6096084 - DNA, 25 bp, Homo sapien
catcgagagcaacattgtgattgac

SEQ ID NO: 6096085 - DNA, 25 bp, Homo sapien
ccactgcatctctccacaaagccag

SEQ ID NO: 6096086 - DNA, 25 bp, Homo sapien
acatgtaatctctatggacttgctt

SEQ ID NO: 6096087 - DNA, 25 bp, Homo sapien
cataagagttgctgtccatccagat

SEQ ID NO: 6096088 - DNA, 25 bp, Homo sapien
taaaagagagttgcccatagcgaac

SEQ ID NO: 6096089 - DNA, 25 bp, Homo sapien
catgaacataagagttgctgtccat

SEQ ID NO: 6096090 - DNA, 25 bp, Homo sapien
ggtataagcaaagaatatttccata

SEQ ID NO: 6096091 - DNA, 25 bp, Homo sapien
aagaatgaaaatacatgtaatctct

SEQ ID NO: 6096092 - DNA, 25 bp, Homo sapien
agttcgagccatgattatagctgcc

SEQ ID NO: 6096093 - DNA, 25 bp, Homo sapien
gattgacgataagccttttatgttg

SEQ ID NO: 6096094 - DNA, 25 bp, Homo sapien
tgcaatttaccaggtataagcaaag

SEQ ID NO: 6096095 - DNA, 25 bp, Homo sapien
ataagccactgcatctctccacaaa

SEQ ID NO: 6096096 - DNA, 25 bp, Homo sapien
tgtccatccagataaagaccctaca

SEQ ID NO: 6096097 - DNA, 25 bp, Homo sapien
ggaaaaaagaatgaaaatacatgta

SEQ ID NO: 6096098 - DNA, 25 bp, Homo sapien
gcgaaccagtgagccacatcaaatc

SEQ ID NO: 6096099 - DNA, 25 bp, Homo sapien
cattgtgattgacgataagcctttt

SEQ ID NO: 6096100 - DNA, 25 bp, Homo sapien
aatctctatggacttgcttgaacaa

SEQ ID NO: 6096101 - DNA, 25 bp, Homo sapien
gtttatggcgtgtacattcattcat

SEQ ID NO: 6096102 - DNA, 25 bp, Homo sapien
agtaaaaaaatacatgaaattacag

SEQ ID NO: 6096103 - DNA, 25 bp, Homo sapien
gatctaaacggcgagttgtgaccat

SEQ ID NO: 6096104 - DNA, 25 bp, Homo sapien
gattcaagtaaaaaaatacatgaaa

SEQ ID NO: 6096105 - DNA, 25 bp, Homo sapien
cttgcttgaacaaagggcgtttatg

SEQ ID NO: 6096106 - DNA, 25 bp, Homo sapien
cacggataaatagtgctcgagggat

SEQ ID NO: 6096107 - DNA, 25 bp, Homo sapien
acacctttctctgaaagtttcccag

SEQ ID NO: 6096108 - DNA, 25 bp, Homo sapien
ctatatgattcaagtaaaaaaatac

SEQ ID NO: 6096109 - DNA, 25 bp, Homo sapien
aactggcatccacatgaacataaga

SEQ ID NO: 6096110 - DNA, 25 bp, Homo sapien
tcaaatcacggataaatagtgctcg

SEQ ID NO: 6096111 - DNA, 25 bp, Homo sapien
gattatagctgccacagcaatacca

SEQ ID NO: 6096112 - DNA, 25 bp, Homo sapien
gtcctatccatgagatcaaaccaat

SEQ ID NO: 6096113 - DNA, 25 bp, Homo sapien
ggctggtgcaatttaccaggtataa

SEQ ID NO: 6096114 - DNA, 25 bp, Homo sapien
agatcaaaccaattgtagctgccac

SEQ ID NO: 6096115 - DNA, 25 bp, Homo sapien
gtgaccataagccactgcatctctc

SEQ ID NO: 6096116 - DNA, 25 bp, Homo sapien
caaaaacaagttctttcaaagatct

SEQ ID NO: 6096117 - DNA, 25 bp, Homo sapien
catccacatgaacataagagttgct

SEQ ID NO: 6096118 - DNA, 25 bp, Homo sapien
cagtgagccacatcaaatcacggat

SEQ ID NO: 6096119 - DNA, 25 bp, Homo sapien
tacattcattcattacggtccaaaa

SEQ ID NO: 6096120 - DNA, 25 bp, Homo sapien
ggcgtgtacattcattcattacggt

SEQ ID NO: 6096121 - DNA, 25 bp, Homo sapien
ctgccacgaagaatgactggctggt

SEQ ID NO: 6096122 - DNA, 25 bp, Homo sapien
aaccaattgtagctgccacgaagaa

SEQ ID NO: 6096123 - DNA, 25 bp, Homo sapien
aagggcgtttatggcgtgtacattc

SEQ ID NO: 6096124 - DNA, 25 bp, Homo sapien
ttcaaagatctaaacggcgagttgt

SEQ ID NO: 6096125 - DNA, 25 bp, Homo sapien
ttgtagctgccacgaagaatgactg

SEQ ID NO: 6096126 - DNA, 25 bp, Homo sapien
cccatagcgaaccagtgagccacat

SEQ ID NO: 6096127 - DNA, 25 bp, Homo sapien
gaaaatacatgtaatctctatggac

SEQ ID NO: 6096128 - DNA, 25 bp, Homo sapien
tcccatcatcgagagcaacattgtg

SEQ ID NO: 6096129 - DNA, 25 bp, Homo sapien
aaaaatacatgaaattacagagtag

SEQ ID NO: 6096130 - DNA, 25 bp, Homo sapien
cattcattacggtccaaaaacaagt

SEQ ID NO: 6096131 - DNA, 25 bp, Homo sapien
atgactggctggtgcaatttaccag

SEQ ID NO: 6096132 - DNA, 25 bp, Homo sapien
ccacatttgggaaactggcatccac

SEQ ID NO: 6096133 - DNA, 25 bp, Homo sapien
catctctccacaaagccagtcctat

SEQ ID NO: 6096134 - DNA, 25 bp, Homo sapien
ttaccaggtataagcaaagaatatt

SEQ ID NO: 6096135 - DNA, 25 bp, Homo sapien
aagccagtcctatccatgagatcaa

SEQ ID NO: 6096136 - DNA, 25 bp, Homo sapien
aattacagagtagttgtcttataac

SEQ ID NO: 6096137 - DNA, 25 bp, Homo sapien
gccacatcaaatcacggataaatag

SEQ ID NO: 6096138 - DNA, 25 bp, Homo sapien
gagggatcataagcccgtttcccat

SEQ ID NO: 6096139 - DNA, 25 bp, Homo sapien
gcccgtttcccatcatcgagagcaa

SEQ ID NO: 6096140 - DNA, 25 bp, Homo sapien
agttctttcaaagatctaaacggcg

SEQ ID NO: 6096141 - DNA, 25 bp, Homo sapien
agttgctgtccatccagataaagac

SEQ ID NO: 6096142 - DNA, 25 bp, Homo sapien
cgaagaatgactggctggtgcaatt

SEQ ID NO: 6096143 - DNA, 25 bp, Homo sapien
tttactatatgattcaagtaaaaaa

SEQ ID NO: 6096144 - DNA, 25 bp, Homo sapien
tccatgagatcaaaccaattgtagc

SEQ ID NO: 6096145 - DNA, 25 bp, Homo sapien
gagttgcccatagcgaaccagtgag

SEQ ID NO: 6096146 - DNA, 25 bp, Homo sapien
gaaagtttcccagttcgagccatga

SEQ ID NO: 6096147 - DNA, 25 bp, Homo sapien
tccacaaagccagtcctatccatga

SEQ ID NO: 6096148 - DNA, 25 bp, Homo sapien
tatggacttgcttgaacaaagggcg

SEQ ID NO: 6096149 - DNA, 25 bp, Homo sapien
cctacaaacctaacacctttctctg

SEQ ID NO: 6096150 - DNA, 25 bp, Homo sapien
aatttgtccacatttgggaaactgg

SEQ ID NO: 6096151 - DNA, 25 bp, Homo sapien
ttgggaaactggcatccacatgaac

SEQ ID NO: 6096152 - DNA, 25 bp, Homo sapien
agcaaagaatatttccatatccata

SEQ ID NO: 6096153 - DNA, 25 bp, Homo sapien
gtgctcgagggatcataagcccgtt

SEQ ID NO: 6096154 - DNA, 25 bp, Homo sapien
ttctctgaaagtttcccagttcgag

SEQ ID NO: 6096155 - DNA, 25 bp, Homo sapien
taaatagtgctcgagggatcataag

SEQ ID NO: 6096156 - DNA, 25 bp, Homo sapien
cgagttgtgaccataagccactgca

SEQ ID NO: 6096157 - DNA, 25 bp, Homo sapien
caaacctaacacctttctctgaaag

SEQ ID NO: 6096158 - DNA, 25 bp, Homo sapien
tgttcctcttcagcctgatgtaacc

SEQ ID NO: 6096159 - DNA, 25 bp, Homo sapien
ctctctaccagatgcatcaatggcg

SEQ ID NO: 6096160 - DNA, 25 bp, Homo sapien
acgaagacactgtaagatgctgatc

SEQ ID NO: 6096161 - DNA, 25 bp, Homo sapien
atacccaaccgcagccacaccgtgg

SEQ ID NO: 6096162 - DNA, 25 bp, Homo sapien
ttccgttgataaatcaaaagagaaa

SEQ ID NO: 6096163 - DNA, 25 bp, Homo sapien
taagatgctgatcaaatgcagataa

SEQ ID NO: 6096164 - DNA, 25 bp, Homo sapien
taatggttactgtttcagattcatc

SEQ ID NO: 6096165 - DNA, 25 bp, Homo sapien
tccttgcgtagacctccgttcttaa

SEQ ID NO: 6096166 - DNA, 25 bp, Homo sapien
ccaatgccttcaagagactcttctc

SEQ ID NO: 6096167 - DNA, 25 bp, Homo sapien
cccgcaccgcccatcaaacacgccg

SEQ ID NO: 6096168 - DNA, 25 bp, Homo sapien
gggaaagaagccatcttgttgattc

SEQ ID NO: 6096169 - DNA, 25 bp, Homo sapien
tttcagattcatccttttgcatctc

SEQ ID NO: 6096170 - DNA, 25 bp, Homo sapien
tgatgagccaatgccttcaagagac

SEQ ID NO: 6096171 - DNA, 25 bp, Homo sapien
ttggtggggaaagaagccatcttgt

SEQ ID NO: 6096172 - DNA, 25 bp, Homo sapien
ctggaactctctaccagatgcatca

SEQ ID NO: 6096173 - DNA, 25 bp, Homo sapien
gcaagttccttcttccatagagtaa

SEQ ID NO: 6096174 - DNA, 25 bp, Homo sapien
agaagccatcttgttgattccacag

SEQ ID NO: 6096175 - DNA, 25 bp, Homo sapien
tgagaccaccgttgcagccattgtt

SEQ ID NO: 6096176 - DNA, 25 bp, Homo sapien
ccgcccatcaaacacgccgccgcta

SEQ ID NO: 6096177 - DNA, 25 bp, Homo sapien
ccttcaagagactcttctcatcatt

SEQ ID NO: 6096178 - DNA, 25 bp, Homo sapien
aggtattattgcacatagttgttac

SEQ ID NO: 6096179 - DNA, 25 bp, Homo sapien
caatgtactcaaaggcatagtccat

SEQ ID NO: 6096180 - DNA, 25 bp, Homo sapien
gaacccttgcttgatccatacccaa

SEQ ID NO: 6096181 - DNA, 25 bp, Homo sapien
aggataatcttcttccttgcgtaga

SEQ ID NO: 6096182 - DNA, 25 bp, Homo sapien
agagagaatgatctgatgatcactt

SEQ ID NO: 6096183 - DNA, 25 bp, Homo sapien
agtccatgagaccaccgttgcagcc

SEQ ID NO: 6096184 - DNA, 25 bp, Homo sapien
caaatgcagataagagagaatgatc

SEQ ID NO: 6096185 - DNA, 25 bp, Homo sapien
ttcacaatgatgtaatctgaaccct

SEQ ID NO: 6096186 - DNA, 25 bp, Homo sapien
accagatgcatcaatggcgacactg

SEQ ID NO: 6096187 - DNA, 25 bp, Homo sapien
ggtcaagatcaaccccgcaccgccc

SEQ ID NO: 6096188 - DNA, 25 bp, Homo sapien
gaattcttcacaatgatgtaatctg

SEQ ID NO: 6096189 - DNA, 25 bp, Homo sapien
gagaccctctggtttcccagtgttc

SEQ ID NO: 6096190 - DNA, 25 bp, Homo sapien
cttggtgtccattaatggttactgt

SEQ ID NO: 6096191 - DNA, 25 bp, Homo sapien
tgcatcaatggcgacactgagaggc

SEQ ID NO: 6096192 - DNA, 25 bp, Homo sapien
aaccgcagccacaccgtggtcaaga

SEQ ID NO: 6096193 - DNA, 25 bp, Homo sapien
gtagacctccgttcttaacaatgta

SEQ ID NO: 6096194 - DNA, 25 bp, Homo sapien
tgataaatcaaaagagaaaaaacga

SEQ ID NO: 6096195 - DNA, 25 bp, Homo sapien
aatggcgacactgagaggctgatga

SEQ ID NO: 6096196 - DNA, 25 bp, Homo sapien
acactgagaggctgatgagccaatg

SEQ ID NO: 6096197 - DNA, 25 bp, Homo sapien
aatgatctgatgatcacttagtttt

SEQ ID NO: 6096198 - DNA, 25 bp, Homo sapien
catcttgttgattccacagagaccc

SEQ ID NO: 6096199 - DNA, 25 bp, Homo sapien
caccgtggtcaagatcaaccccgca

SEQ ID NO: 6096200 - DNA, 25 bp, Homo sapien
atgatgtaatctgaacccttgcttg

SEQ ID NO: 6096201 - DNA, 25 bp, Homo sapien
tcttctcatcattagtaggtacgtc

SEQ ID NO: 6096202 - DNA, 25 bp, Homo sapien
cttcagcctgatgtaacctttttct

SEQ ID NO: 6096203 - DNA, 25 bp, Homo sapien
ccttttgcatctcgcaagttccttc

SEQ ID NO: 6096204 - DNA, 25 bp, Homo sapien
gccgctatagaactggaactctcta

SEQ ID NO: 6096205 - DNA, 25 bp, Homo sapien
attcatccttttgcatctcgcaagt

SEQ ID NO: 6096206 - DNA, 25 bp, Homo sapien
cagataagagagaatgatctgatga

SEQ ID NO: 6096207 - DNA, 25 bp, Homo sapien
atagaactggaactctctaccagat

SEQ ID NO: 6096208 - DNA, 25 bp, Homo sapien
ctccgttcttaacaatgtactcaaa

SEQ ID NO: 6096209 - DNA, 25 bp, Homo sapien
gtccattaatggttactgtttcaga

SEQ ID NO: 6096210 - DNA, 25 bp, Homo sapien
actcaaaggcatagtccatgagacc

SEQ ID NO: 6096211 - DNA, 25 bp, Homo sapien
gctgatcaaatgcagataagagaga

SEQ ID NO: 6096212 - DNA, 25 bp, Homo sapien
caaaagagaaaaaacgaagacactg

SEQ ID NO: 6096213 - DNA, 25 bp, Homo sapien
tcccagtgttcctcttcagcctgat

SEQ ID NO: 6096214 - DNA, 25 bp, Homo sapien
ttgcttgatccatacccaaccgcag

SEQ ID NO: 6096215 - DNA, 25 bp, Homo sapien
gttgattccacagagaccctctggt

SEQ ID NO: 6096216 - DNA, 25 bp, Homo sapien
atcaaccccgcaccgcccatcaaac

SEQ ID NO: 6096217 - DNA, 25 bp, Homo sapien
atcaaacacgccgccgctatagaac

SEQ ID NO: 6096218 - DNA, 25 bp, Homo sapien
ttactgtttcagattcatccttttg

SEQ ID NO: 6096219 - DNA, 25 bp, Homo sapien
tccacagagaccctctggtttccca

SEQ ID NO: 6096220 - DNA, 25 bp, Homo sapien
ctggtttcccagtgttcctcttcag

SEQ ID NO: 6096221 - DNA, 25 bp, Homo sapien
cagccacaccgtggtcaagatcaac

SEQ ID NO: 6096222 - DNA, 25 bp, Homo sapien
tcttaacaatgtactcaaaggcata

SEQ ID NO: 6096223 - DNA, 25 bp, Homo sapien
agagtaaggataatcttcttccttg

SEQ ID NO: 6096224 - DNA, 25 bp, Homo sapien
catctcgcaagttccttcttccata

SEQ ID NO: 6096225 - DNA, 25 bp, Homo sapien
gtacgtcttggtgtccattaatggt

SEQ ID NO: 6096226 - DNA, 25 bp, Homo sapien
acatagttgttacaagacttccgtt

SEQ ID NO: 6096227 - DNA, 25 bp, Homo sapien
cacgccgccgctatagaactggaac

SEQ ID NO: 6096228 - DNA, 25 bp, Homo sapien
acactgtaagatgctgatcaaatgc

SEQ ID NO: 6096229 - DNA, 25 bp, Homo sapien
ccccaagaattcttcacaatgatgt

SEQ ID NO: 6096230 - DNA, 25 bp, Homo sapien
ttccatagagtaaggataatcttct

SEQ ID NO: 6096231 - DNA, 25 bp, Homo sapien
ctgatgatcacttagttttggtggg

SEQ ID NO: 6096232 - DNA, 25 bp, Homo sapien
tattgcacatagttgttacaagact

SEQ ID NO: 6096233 - DNA, 25 bp, Homo sapien
caccgttgcagccattgttgtaggt

SEQ ID NO: 6096234 - DNA, 25 bp, Homo sapien
aggcatagtccatgagaccaccgtt

SEQ ID NO: 6096235 - DNA, 25 bp, Homo sapien
atcttcttccttgcgtagacctccg

SEQ ID NO: 6096236 - DNA, 25 bp, Homo sapien
cctgatgtaacctttttctccccat

SEQ ID NO: 6096237 - DNA, 25 bp, Homo sapien
agagactcttctcatcattagtagg

SEQ ID NO: 6096238 - DNA, 25 bp, Homo sapien
taatctgaacccttgcttgatccat

SEQ ID NO: 6096239 - DNA, 25 bp, Homo sapien
tagtaggtacgtcttggtgtccatt

SEQ ID NO: 6096240 - DNA, 25 bp, Homo sapien
tccttcttccatagagtaaggataa

SEQ ID NO: 6096241 - DNA, 25 bp, Homo sapien
ttgttacaagacttccgttgataaa

SEQ ID NO: 6096242 - DNA, 25 bp, Homo sapien
agaggctgatgagccaatgccttca

SEQ ID NO: 6096243 - DNA, 25 bp, Homo sapien
caagacttccgttgataaatcaaaa

SEQ ID NO: 6096244 - DNA, 25 bp, Homo sapien
catcattagtaggtacgtcttggtg

SEQ ID NO: 6096245 - DNA, 25 bp, Homo sapien
gaaaaaacgaagacactgtaagatg

SEQ ID NO: 6096246 - DNA, 25 bp, Homo sapien
ctaccgtgggtacaagagtgaggaa

SEQ ID NO: 6096247 - DNA, 25 bp, Homo sapien
tcttgcatggaatcttgagttcaga

SEQ ID NO: 6096248 - DNA, 25 bp, Homo sapien
gagtttaaggtttggttctgtgaca

SEQ ID NO: 6096249 - DNA, 25 bp, Homo sapien
cattgatgatgtagtgatgatcatc

SEQ ID NO: 6096250 - DNA, 25 bp, Homo sapien
tgagtagagctctgagaaccatctg

SEQ ID NO: 6096251 - DNA, 25 bp, Homo sapien
ggcctgtgagcgtggctgaggctga

SEQ ID NO: 6096252 - DNA, 25 bp, Homo sapien
tagggttcttgcatggaatcttgag

SEQ ID NO: 6096253 - DNA, 25 bp, Homo sapien
aagaacagaatgagtcgaggcctgt

SEQ ID NO: 6096254 - DNA, 25 bp, Homo sapien
tgttccaatcatggataggaatata

SEQ ID NO: 6096255 - DNA, 25 bp, Homo sapien
gcttggaataccgatgtcggtcagg

SEQ ID NO: 6096256 - DNA, 25 bp, Homo sapien
cgtgctcattgatgatgtagtgatg

SEQ ID NO: 6096257 - DNA, 25 bp, Homo sapien
agttgatgtaaggatccatcagtgg

SEQ ID NO: 6096258 - DNA, 25 bp, Homo sapien
agcaatagtaactctcgttacactc

SEQ ID NO: 6096259 - DNA, 25 bp, Homo sapien
ttccatcaatcttagtgagctgact

SEQ ID NO: 6096260 - DNA, 25 bp, Homo sapien
ttctccataactctgtgattcttta

SEQ ID NO: 6096261 - DNA, 25 bp, Homo sapien
agggtacgtgctcattgatgatgta

SEQ ID NO: 6096262 - DNA, 25 bp, Homo sapien
gttcagagactgagttggttaggtt

SEQ ID NO: 6096263 - DNA, 25 bp, Homo sapien
agaagcagggtacgtgctcattgat

SEQ ID NO: 6096264 - DNA, 25 bp, Homo sapien
agaatgagtcgaggcctgtgagcgt

SEQ ID NO: 6096265 - DNA, 25 bp, Homo sapien
gatctgaagaacagaatgagtcgag

SEQ ID NO: 6096266 - DNA, 25 bp, Homo sapien
ctccgagctaccttctccataactc

SEQ ID NO: 6096267 - DNA, 25 bp, Homo sapien
gatgaaatatatgtatgtctagcgt

SEQ ID NO: 6096268 - DNA, 25 bp, Homo sapien
aacagtgcttggaataccgatgtcg

SEQ ID NO: 6096269 - DNA, 25 bp, Homo sapien
gtatgtctagcgtcataagtggtat

SEQ ID NO: 6096270 - DNA, 25 bp, Homo sapien
gggttagggttcttgcatggaatct

SEQ ID NO: 6096271 - DNA, 25 bp, Homo sapien
attccaaacagtgcttggaataccg

SEQ ID NO: 6096272 - DNA, 25 bp, Homo sapien
gttcttggtcaaagttgatgtaagg

SEQ ID NO: 6096273 - DNA, 25 bp, Homo sapien
atggaatcttgagttcagagactga

SEQ ID NO: 6096274 - DNA, 25 bp, Homo sapien
aggctgaaccaccagtaaacaaggg

SEQ ID NO: 6096275 - DNA, 25 bp, Homo sapien
tcagtggaggaagcgatgcagaggc

SEQ ID NO: 6096276 - DNA, 25 bp, Homo sapien
ttctttaggcccgaggcttccatca

SEQ ID NO: 6096277 - DNA, 25 bp, Homo sapien
cgatgtcggtcaggaggctctccga

SEQ ID NO: 6096278 - DNA, 25 bp, Homo sapien
tacactcgatcatcagcaattccaa

SEQ ID NO: 6096279 - DNA, 25 bp, Homo sapien
gaggctctccgagctaccttctcca

SEQ ID NO: 6096280 - DNA, 25 bp, Homo sapien
tagtgagctgactgagtagagctct

SEQ ID NO: 6096281 - DNA, 25 bp, Homo sapien
aagaattgttccaatcatggatagg

SEQ ID NO: 6096282 - DNA, 25 bp, Homo sapien
aatcatggataggaatatagcaata

SEQ ID NO: 6096283 - DNA, 25 bp, Homo sapien
cactgagataagaagagggttcttg

SEQ ID NO: 6096284 - DNA, 25 bp, Homo sapien
ccccgaagaattgttccaatcatgg

SEQ ID NO: 6096285 - DNA, 25 bp, Homo sapien
caatcttagtgagctgactgagtag

SEQ ID NO: 6096286 - DNA, 25 bp, Homo sapien
ggtcaggaggctctccgagctacct

SEQ ID NO: 6096287 - DNA, 25 bp, Homo sapien
ataactctgtgattctttaggcccg

SEQ ID NO: 6096288 - DNA, 25 bp, Homo sapien
tgagcgtggctgaggctgaaccacc

SEQ ID NO: 6096289 - DNA, 25 bp, Homo sapien
tcagacaagcacacgttatttcccc

SEQ ID NO: 6096290 - DNA, 25 bp, Homo sapien
gatccatcagtggaggaagcgatgc

SEQ ID NO: 6096291 - DNA, 25 bp, Homo sapien
gataagaagagggttcttggtcaaa

SEQ ID NO: 6096292 - DNA, 25 bp, Homo sapien
agtcgaggcctgtgagcgtggctga

SEQ ID NO: 6096293 - DNA, 25 bp, Homo sapien
ggttctgtgacaaattggagaagca

SEQ ID NO: 6096294 - DNA, 25 bp, Homo sapien
aattggagaagcagggtacgtgctc

SEQ ID NO: 6096295 - DNA, 25 bp, Homo sapien
cgaggcttccatcaatcttagtgag

SEQ ID NO: 6096296 - DNA, 25 bp, Homo sapien
gaggaaatgtttgtacaatcagaca

SEQ ID NO: 6096297 - DNA, 25 bp, Homo sapien
ggtcaaagttgatgtaaggatccat

SEQ ID NO: 6096298 - DNA, 25 bp, Homo sapien
gtgacaaattggagaagcagggtac

SEQ ID NO: 6096299 - DNA, 25 bp, Homo sapien
gatcatcactgagataagaagaggg

SEQ ID NO: 6096300 - DNA, 25 bp, Homo sapien
agactgagttggttaggttcgagtt

SEQ ID NO: 6096301 - DNA, 25 bp, Homo sapien
atgtttgtacaatcagacaagcaca

SEQ ID NO: 6096302 - DNA, 25 bp, Homo sapien
taggcccgaggcttccatcaatctt

SEQ ID NO: 6096303 - DNA, 25 bp, Homo sapien
ttttacatgaatctaccgtgggtac

SEQ ID NO: 6096304 - DNA, 25 bp, Homo sapien
tgggtacaagagtgaggaaatgttt

SEQ ID NO: 6096305 - DNA, 25 bp, Homo sapien
cgatcatcagcaattccaaacagtg

SEQ ID NO: 6096306 - DNA, 25 bp, Homo sapien
tgagaaccatctgatctgaagaaca

SEQ ID NO: 6096307 - DNA, 25 bp, Homo sapien
tctcgttacactcgatcatcagcaa

SEQ ID NO: 6096308 - DNA, 25 bp, Homo sapien
tcagcaattccaaacagtgcttgga

SEQ ID NO: 6096309 - DNA, 25 bp, Homo sapien
gaataccgatgtcggtcaggaggct

SEQ ID NO: 6096310 - DNA, 25 bp, Homo sapien
tcataagtggtattttacatgaatc

SEQ ID NO: 6096311 - DNA, 25 bp, Homo sapien
agtaactctcgttacactcgatcat

SEQ ID NO: 6096312 - DNA, 25 bp, Homo sapien
atgaatctaccgtgggtacaagagt

SEQ ID NO: 6096313 - DNA, 25 bp, Homo sapien
gcgatgcagaggctgtctcatcaaa

SEQ ID NO: 6096314 - DNA, 25 bp, Homo sapien
ctgtgattctttaggcccgaggctt

SEQ ID NO: 6096315 - DNA, 25 bp, Homo sapien
aagagggttcttggtcaaagttgat

SEQ ID NO: 6096316 - DNA, 25 bp, Homo sapien
aagagtgaggaaatgtttgtacaat

SEQ ID NO: 6096317 - DNA, 25 bp, Homo sapien
tggctgaggctgaaccaccagtaaa

SEQ ID NO: 6096318 - DNA, 25 bp, Homo sapien
aggtttggttctgtgacaaattgga

SEQ ID NO: 6096319 - DNA, 25 bp, Homo sapien
gtacaatcagacaagcacacgttat

SEQ ID NO: 6096320 - DNA, 25 bp, Homo sapien
tgtaaggatccatcagtggaggaag

SEQ ID NO: 6096321 - DNA, 25 bp, Homo sapien
agtgatgatcatcactgagataaga

SEQ ID NO: 6096322 - DNA, 25 bp, Homo sapien
aactacgatgaaatatatgtatgtc

SEQ ID NO: 6096323 - DNA, 25 bp, Homo sapien
ctagcgtcataagtggtattttaca

SEQ ID NO: 6096324 - DNA, 25 bp, Homo sapien
gagctctgagaaccatctgatctga

SEQ ID NO: 6096325 - DNA, 25 bp, Homo sapien
gctaccttctccataactctgtgat

SEQ ID NO: 6096326 - DNA, 25 bp, Homo sapien
aggaagcgatgcagaggctgtctca

SEQ ID NO: 6096327 - DNA, 25 bp, Homo sapien
gtggtattttacatgaatctaccgt

SEQ ID NO: 6096328 - DNA, 25 bp, Homo sapien
gaatatagcaatagtaactctcgtt

SEQ ID NO: 6096329 - DNA, 25 bp, Homo sapien
ggataggaatatagcaatagtaact

SEQ ID NO: 6096330 - DNA, 25 bp, Homo sapien
gctgactgagtagagctctgagaac

SEQ ID NO: 6096331 - DNA, 25 bp, Homo sapien
tgatgtagtgatgatcatcactgag

SEQ ID NO: 6096332 - DNA, 25 bp, Homo sapien
aacaaggggttagggttcttgcatg

SEQ ID NO: 6096333 - DNA, 25 bp, Homo sapien
ccatctgatctgaagaacagaatga

SEQ ID NO: 6096334 - DNA, 25 bp, Homo sapien
tcttgagttcagagactgagttggt

SEQ ID NO: 6096335 - DNA, 25 bp, Homo sapien
atatatgtatgtctagcgtcataag

SEQ ID NO: 6096336 - DNA, 25 bp, Homo sapien
actgagttcacaatggttgcaaact

SEQ ID NO: 6096337 - DNA, 25 bp, Homo sapien
atggttgcaaactcaggacccttca

SEQ ID NO: 6096338 - DNA, 25 bp, Homo sapien
ccaacaagaaatccatcaatgtctt

SEQ ID NO: 6096339 - DNA, 25 bp, Homo sapien
agctacatggacttcttgtgcttgc

SEQ ID NO: 6096340 - DNA, 25 bp, Homo sapien
caacaacaacaaggtcgctaacctc

SEQ ID NO: 6096341 - DNA, 25 bp, Homo sapien
taacctcccttttatttctcatctc

SEQ ID NO: 6096342 - DNA, 25 bp, Homo sapien
ttgcctccattgacagaacctccat

SEQ ID NO: 6096343 - DNA, 25 bp, Homo sapien
tactcaaattgaaaaaaagaatcac

SEQ ID NO: 6096344 - DNA, 25 bp, Homo sapien
tattgtcccagctaggcacagcatc

SEQ ID NO: 6096345 - DNA, 25 bp, Homo sapien
ttcttcgacgtgactgagttcacaa

SEQ ID NO: 6096346 - DNA, 25 bp, Homo sapien
gcgcgaagcaaacatcaaacgtctt

SEQ ID NO: 6096347 - DNA, 25 bp, Homo sapien
atgtcttcttctttggcaagctctg

SEQ ID NO: 6096348 - DNA, 25 bp, Homo sapien
ccattgacagaacctccatatatga

SEQ ID NO: 6096349 - DNA, 25 bp, Homo sapien
catctgttccatggagactagcgat

SEQ ID NO: 6096350 - DNA, 25 bp, Homo sapien
gatgtaagaacacaacaacaacaac

SEQ ID NO: 6096351 - DNA, 25 bp, Homo sapien
aaggaggcaccaccaacaagaaatc

SEQ ID NO: 6096352 - DNA, 25 bp, Homo sapien
ttccatggagactagcgatttccgt

SEQ ID NO: 6096353 - DNA, 25 bp, Homo sapien
ttctgttttccattattagttcaag

SEQ ID NO: 6096354 - DNA, 25 bp, Homo sapien
agctctgcactgttgcctccattga

SEQ ID NO: 6096355 - DNA, 25 bp, Homo sapien
gcggacagctacatggacttcttgt

SEQ ID NO: 6096356 - DNA, 25 bp, Homo sapien
acagcttagttacaaagatctttaa

SEQ ID NO: 6096357 - DNA, 25 bp, Homo sapien
cagcatcagcaaacgccttcagttg

SEQ ID NO: 6096358 - DNA, 25 bp, Homo sapien
aaaaaagaatcacagcttagttaca

SEQ ID NO: 6096359 - DNA, 25 bp, Homo sapien
tcgttttggaagcaacttcctcaga

SEQ ID NO: 6096360 - DNA, 25 bp, Homo sapien
agaaatccatcaatgtcttcttctt

SEQ ID NO: 6096361 - DNA, 25 bp, Homo sapien
cagcaaacgccttcagttgcgcgaa

SEQ ID NO: 6096362 - DNA, 25 bp, Homo sapien
aacctccatatatgattctcgtttt

SEQ ID NO: 6096363 - DNA, 25 bp, Homo sapien
tcatctcatctgttccatggagact

SEQ ID NO: 6096364 - DNA, 25 bp, Homo sapien
ctgtcaaaccagagctcacgaatca

SEQ ID NO: 6096365 - DNA, 25 bp, Homo sapien
tagttacaaagatctttaatcaaag

SEQ ID NO: 6096366 - DNA, 25 bp, Homo sapien
tgattctcgttttggaagcaacttc

SEQ ID NO: 6096367 - DNA, 25 bp, Homo sapien
caacttcctcagagacattcttctt

SEQ ID NO: 6096368 - DNA, 25 bp, Homo sapien
tttccgttactgatagttctcaatc

SEQ ID NO: 6096369 - DNA, 25 bp, Homo sapien
ccatcaatgtcttcttctttggcaa

SEQ ID NO: 6096370 - DNA, 25 bp, Homo sapien
aattgaaaaaaagaatcacagctta

SEQ ID NO: 6096371 - DNA, 25 bp, Homo sapien
agaatcacagcttagttacaaagat

SEQ ID NO: 6096372 - DNA, 25 bp, Homo sapien
ggagactagcgatttccgttactga

SEQ ID NO: 6096373 - DNA, 25 bp, Homo sapien
tcaggacccttcaaggaggcaccac

SEQ ID NO: 6096374 - DNA, 25 bp, Homo sapien
ctgaggagatgcaactttaccagtt

SEQ ID NO: 6096375 - DNA, 25 bp, Homo sapien
ccttcaaggaggcaccaccaacaag

SEQ ID NO: 6096376 - DNA, 25 bp, Homo sapien
ttcacaatggttgcaaactcaggac

SEQ ID NO: 6096377 - DNA, 25 bp, Homo sapien
tcgctaacctcccttttatttctca

SEQ ID NO: 6096378 - DNA, 25 bp, Homo sapien
agttcaagaagaagatgtaagaaca

SEQ ID NO: 6096379 - DNA, 25 bp, Homo sapien
tcagttgcgcgaagcaaacatcaaa

SEQ ID NO: 6096380 - DNA, 25 bp, Homo sapien
tatttctcatctcatctgttccatg

SEQ ID NO: 6096381 - DNA, 25 bp, Homo sapien
ttttccattattagttcaagaagaa

SEQ ID NO: 6096382 - DNA, 25 bp, Homo sapien
cccttttatttctcatctcatctgt

SEQ ID NO: 6096383 - DNA, 25 bp, Homo sapien
ccaaccgcggacagctacatggact

SEQ ID NO: 6096384 - DNA, 25 bp, Homo sapien
gctcgtatgcaacaactatattgtc

SEQ ID NO: 6096385 - DNA, 25 bp, Homo sapien
tccaattgcccatacaggctcgtat

SEQ ID NO: 6096386 - DNA, 25 bp, Homo sapien
gcaccaccaacaagaaatccatcaa

SEQ ID NO: 6096387 - DNA, 25 bp, Homo sapien
ttactgatagttctcaatcaagcag

SEQ ID NO: 6096388 - DNA, 25 bp, Homo sapien
ttcttctttagccaaccgcggacag

SEQ ID NO: 6096389 - DNA, 25 bp, Homo sapien
agatgcaactttaccagttccaatt

SEQ ID NO: 6096390 - DNA, 25 bp, Homo sapien
taggcacagcatcagcaaacgcctt

SEQ ID NO: 6096391 - DNA, 25 bp, Homo sapien
tagcgatttccgttactgatagttc

SEQ ID NO: 6096392 - DNA, 25 bp, Homo sapien
cccagctaggcacagcatcagcaaa

SEQ ID NO: 6096393 - DNA, 25 bp, Homo sapien
gcaactttcttcgacgtgactgagt

SEQ ID NO: 6096394 - DNA, 25 bp, Homo sapien
ctcaatcaagcagcaactttcttcg

SEQ ID NO: 6096395 - DNA, 25 bp, Homo sapien
tcaaagacccttttatctctctctg

SEQ ID NO: 6096396 - DNA, 25 bp, Homo sapien
atagttctcaatcaagcagcaactt

SEQ ID NO: 6096397 - DNA, 25 bp, Homo sapien
tgacagaacctccatatatgattct

SEQ ID NO: 6096398 - DNA, 25 bp, Homo sapien
gcaaactcaggacccttcaaggagg

SEQ ID NO: 6096399 - DNA, 25 bp, Homo sapien
ttaatcaaagacccttttatctctc

SEQ ID NO: 6096400 - DNA, 25 bp, Homo sapien
ctttagccaaccgcggacagctaca

SEQ ID NO: 6096401 - DNA, 25 bp, Homo sapien
aactttaccagttccaattgcccat

SEQ ID NO: 6096402 - DNA, 25 bp, Homo sapien
acgccttcagttgcgcgaagcaaac

SEQ ID NO: 6096403 - DNA, 25 bp, Homo sapien
atgcaacaactatattgtcccagct

SEQ ID NO: 6096404 - DNA, 25 bp, Homo sapien
catatatgattctcgttttggaagc

SEQ ID NO: 6096405 - DNA, 25 bp, Homo sapien
ttcttgtgcttgctgaggagatgca

SEQ ID NO: 6096406 - DNA, 25 bp, Homo sapien
tgcccatacaggctcgtatgcaaca

SEQ ID NO: 6096407 - DNA, 25 bp, Homo sapien
atacaggctcgtatgcaacaactat

SEQ ID NO: 6096408 - DNA, 25 bp, Homo sapien
gcactgttgcctccattgacagaac

SEQ ID NO: 6096409 - DNA, 25 bp, Homo sapien
gacccttttatctctctctgtcaaa

SEQ ID NO: 6096410 - DNA, 25 bp, Homo sapien
tttatctctctctgtcaaaccagag

SEQ ID NO: 6096411 - DNA, 25 bp, Homo sapien
aaccagagctcacgaatcatttttt

SEQ ID NO: 6096412 - DNA, 25 bp, Homo sapien
caaagatctttaatcaaagaccctt

SEQ ID NO: 6096413 - DNA, 25 bp, Homo sapien
attattagttcaagaagaagatgta

SEQ ID NO: 6096414 - DNA, 25 bp, Homo sapien
accagttccaattgcccatacaggc

SEQ ID NO: 6096415 - DNA, 25 bp, Homo sapien
tgcttgctgaggagatgcaacttta

SEQ ID NO: 6096416 - DNA, 25 bp, Homo sapien
caactatattgtcccagctaggcac

SEQ ID NO: 6096417 - DNA, 25 bp, Homo sapien
tcttctttggcaagctctgcactgt

SEQ ID NO: 6096418 - DNA, 25 bp, Homo sapien
ttggcaagctctgcactgttgcctc

SEQ ID NO: 6096419 - DNA, 25 bp, Homo sapien
gagacattcttctttagccaaccgc

SEQ ID NO: 6096420 - DNA, 25 bp, Homo sapien
tctctctgtcaaaccagagctcacg

SEQ ID NO: 6096421 - DNA, 25 bp, Homo sapien
caagcagcaactttcttcgacgtga

SEQ ID NO: 6096422 - DNA, 25 bp, Homo sapien
agaagaagatgtaagaacacaacaa

SEQ ID NO: 6096423 - DNA, 25 bp, Homo sapien
tggaagcaacttcctcagagacatt

SEQ ID NO: 6096424 - DNA, 25 bp, Homo sapien
gacgtgactgagttcacaatggttg

SEQ ID NO: 6096425 - DNA, 25 bp, Homo sapien
atggacttcttgtgcttgctgagga

SEQ ID NO: 6096426 - DNA, 25 bp, Homo sapien
ttccatacttcacaagcagcagcta

SEQ ID NO: 6096427 - DNA, 25 bp, Homo sapien
gagtgcaattaaactaataaaacaa

SEQ ID NO: 6096428 - DNA, 25 bp, Homo sapien
ccatgtttcgtataggatttcttgt

SEQ ID NO: 6096429 - DNA, 25 bp, Homo sapien
catttgcaagcttcacggataattt

SEQ ID NO: 6096430 - DNA, 25 bp, Homo sapien
gttcaagccctgacacgaaagaata

SEQ ID NO: 6096431 - DNA, 25 bp, Homo sapien
tatatacaacagataacctcggctc

SEQ ID NO: 6096432 - DNA, 25 bp, Homo sapien
actaaatctaattcatctactcttg

SEQ ID NO: 6096433 - DNA, 25 bp, Homo sapien
catgcttccagagctactcggttgg

SEQ ID NO: 6096434 - DNA, 25 bp, Homo sapien
gccatctaatttatcgatggttggg

SEQ ID NO: 6096435 - DNA, 25 bp, Homo sapien
acaataacaaaattgtagttgtgtt

SEQ ID NO: 6096436 - DNA, 25 bp, Homo sapien
ataatttcattaccctcgactgcaa

SEQ ID NO: 6096437 - DNA, 25 bp, Homo sapien
aagttaaatgtgatctctttccata

SEQ ID NO: 6096438 - DNA, 25 bp, Homo sapien
tcattaccctcgactgcaagatcac

SEQ ID NO: 6096439 - DNA, 25 bp, Homo sapien
ttcgtataggatttcttgtggacac

SEQ ID NO: 6096440 - DNA, 25 bp, Homo sapien
tctaattcatctactcttggccatc

SEQ ID NO: 6096441 - DNA, 25 bp, Homo sapien
caaacgtgaattactaaatctaatt

SEQ ID NO: 6096442 - DNA, 25 bp, Homo sapien
aaatagtatatacaacagataacct

SEQ ID NO: 6096443 - DNA, 25 bp, Homo sapien
ataacactcctaagaattaagaatc

SEQ ID NO: 6096444 - DNA, 25 bp, Homo sapien
agaattaagaatccatgtttcgtat

SEQ ID NO: 6096445 - DNA, 25 bp, Homo sapien
caaaaaaaatagtatatacaacaga

SEQ ID NO: 6096446 - DNA, 25 bp, Homo sapien
tgaagagttttttttctatctagat

SEQ ID NO: 6096447 - DNA, 25 bp, Homo sapien
cggaatgaaaagaaacggacaacat

SEQ ID NO: 6096448 - DNA, 25 bp, Homo sapien
gccctgacacgaaagaatataacac

SEQ ID NO: 6096449 - DNA, 25 bp, Homo sapien
ggactccatttgcaagcttcacgga

SEQ ID NO: 6096450 - DNA, 25 bp, Homo sapien
tggacacaacactacaataacaaaa

SEQ ID NO: 6096451 - DNA, 25 bp, Homo sapien
aatgtgatctctttccatacttcac

SEQ ID NO: 6096452 - DNA, 25 bp, Homo sapien
aagaatccatgtttcgtataggatt

SEQ ID NO: 6096453 - DNA, 25 bp, Homo sapien
aaacggacaacatgcaggatggggt

SEQ ID NO: 6096454 - DNA, 25 bp, Homo sapien
tcgatggttgggaagttaaatgtga

SEQ ID NO: 6096455 - DNA, 25 bp, Homo sapien
ccctcgactgcaagatcacgtccct

SEQ ID NO: 6096456 - DNA, 25 bp, Homo sapien
caacactacaataacaaaattgtag

SEQ ID NO: 6096457 - DNA, 25 bp, Homo sapien
tgcaggatggggtagaagaagcggg

SEQ ID NO: 6096458 - DNA, 25 bp, Homo sapien
tcacggataatttcattaccctcga

SEQ ID NO: 6096459 - DNA, 25 bp, Homo sapien
caagcagcagctagttcaggactcc

SEQ ID NO: 6096460 - DNA, 25 bp, Homo sapien
aaagattgagccgagtgcaattaaa

SEQ ID NO: 6096461 - DNA, 25 bp, Homo sapien
tcatctactcttggccatctaattt

SEQ ID NO: 6096462 - DNA, 25 bp, Homo sapien
tacttggttcaagccctgacacgaa

SEQ ID NO: 6096463 - DNA, 25 bp, Homo sapien
agatcacgtccctcattacgagctt

SEQ ID NO: 6096464 - DNA, 25 bp, Homo sapien
caacagataacctcggctcaatctt

SEQ ID NO: 6096465 - DNA, 25 bp, Homo sapien
taatttatcgatggttgggaagtta

SEQ ID NO: 6096466 - DNA, 25 bp, Homo sapien
attgtagttgtgtttaatcttcttt

SEQ ID NO: 6096467 - DNA, 25 bp, Homo sapien
cggggatacttggttcaagccctga

SEQ ID NO: 6096468 - DNA, 25 bp, Homo sapien
tatgtatctatcaaaaaaaatagta

SEQ ID NO: 6096469 - DNA, 25 bp, Homo sapien
taaaaaaaagattgagccgagtgca

SEQ ID NO: 6096470 - DNA, 25 bp, Homo sapien
gaaaagaaacggacaacatgcagga

SEQ ID NO: 6096471 - DNA, 25 bp, Homo sapien
ttttttctatctagatttaagtatg

SEQ ID NO: 6096472 - DNA, 25 bp, Homo sapien
aagaatataacactcctaagaatta

SEQ ID NO: 6096473 - DNA, 25 bp, Homo sapien
tgtacacatgcttccagagctactc

SEQ ID NO: 6096474 - DNA, 25 bp, Homo sapien
tctatcaaaaaaaatagtatataca

SEQ ID NO: 6096475 - DNA, 25 bp, Homo sapien
ttcttgtggacacaacactacaata

SEQ ID NO: 6096476 - DNA, 25 bp, Homo sapien
aagaagcggggatacttggttcaag

SEQ ID NO: 6096477 - DNA, 25 bp, Homo sapien
tcattacgagcttgtacacatgctt

SEQ ID NO: 6096478 - DNA, 25 bp, Homo sapien
acaaaattgtagttgtgtttaatct

SEQ ID NO: 6096479 - DNA, 25 bp, Homo sapien
gttgggaagttaaatgtgatctctt

SEQ ID NO: 6096480 - DNA, 25 bp, Homo sapien
cgtccctcattacgagcttgtacac

SEQ ID NO: 6096481 - DNA, 25 bp, Homo sapien
agttcaggactccatttgcaagctt

SEQ ID NO: 6096482 - DNA, 25 bp, Homo sapien
caagcttcacggataatttcattac

SEQ ID NO: 6096483 - DNA, 25 bp, Homo sapien
atctctttccatacttcacaagcag

SEQ ID NO: 6096484 - DNA, 25 bp, Homo sapien
ctatctagatttaagtatgtatcta

SEQ ID NO: 6096485 - DNA, 25 bp, Homo sapien
gaattactaaatctaattcatctac

SEQ ID NO: 6096486 - DNA, 25 bp, Homo sapien
actgcaagatcacgtccctcattac

SEQ ID NO: 6096487 - DNA, 25 bp, Homo sapien
acacgaaagaatataacactcctaa

SEQ ID NO: 6096488 - DNA, 25 bp, Homo sapien
tttagtaaaatctcgtatactaata

SEQ ID NO: 6096489 - DNA, 25 bp, Homo sapien
gatttaagtatgtatctatcaaaaa

SEQ ID NO: 6096490 - DNA, 25 bp, Homo sapien
acttcacaagcagcagctagttcag

SEQ ID NO: 6096491 - DNA, 25 bp, Homo sapien
tgagccgagtgcaattaaactaata

SEQ ID NO: 6096492 - DNA, 25 bp, Homo sapien
ataacctcggctcaatcttttttag

SEQ ID NO: 6096493 - DNA, 25 bp, Homo sapien
gcagctagttcaggactccatttgc

SEQ ID NO: 6096494 - DNA, 25 bp, Homo sapien
acaacatgcaggatggggtagaaga

SEQ ID NO: 6096495 - DNA, 25 bp, Homo sapien
cgagcttgtacacatgcttccagag

SEQ ID NO: 6096496 - DNA, 25 bp, Homo sapien
taaaatctcgtatactaatataaaa

SEQ ID NO: 6096497 - DNA, 25 bp, Homo sapien
taggatttcttgtggacacaacact

SEQ ID NO: 6096498 - DNA, 25 bp, Homo sapien
ctcttggccatctaatttatcgatg

SEQ ID NO: 6096499 - DNA, 25 bp, Homo sapien
tattccaatacggaatgaaaagaaa

SEQ ID NO: 6096500 - DNA, 25 bp, Homo sapien
ctcctaagaattaagaatccatgtt

SEQ ID NO: 6096501 - DNA, 25 bp, Homo sapien
atggggtagaagaagcggggatact

SEQ ID NO: 6096502 - DNA, 25 bp, Homo sapien
atcaaagttttcagccacaggatca

SEQ ID NO: 6096503 - DNA, 25 bp, Homo sapien
agacaataggagtaaaacacgaaat

SEQ ID NO: 6096504 - DNA, 25 bp, Homo sapien
acttcatcatcgtacactctcgccc

SEQ ID NO: 6096505 - DNA, 25 bp, Homo sapien
agaggacaagatccaatccacaatt

SEQ ID NO: 6096506 - DNA, 25 bp, Homo sapien
gtcatctcgggttgctcgaacacgg

SEQ ID NO: 6096507 - DNA, 25 bp, Homo sapien
ctctcaacgaacttcctcacttcat

SEQ ID NO: 6096508 - DNA, 25 bp, Homo sapien
gatggcgtcagcgtttgcgtctccc

SEQ ID NO: 6096509 - DNA, 25 bp, Homo sapien
aagttgtagacacaggttccatcgt

SEQ ID NO: 6096510 - DNA, 25 bp, Homo sapien
tggactctcttgacattctcttgtt

SEQ ID NO: 6096511 - DNA, 25 bp, Homo sapien
gagtaaaacacgaaattaataagca

SEQ ID NO: 6096512 - DNA, 25 bp, Homo sapien
ttcctcacttcatcatcgtacactc

SEQ ID NO: 6096513 - DNA, 25 bp, Homo sapien
gtttgcgtctcccaaagcagcctgg

SEQ ID NO: 6096514 - DNA, 25 bp, Homo sapien
ccaatccacaattacacaaaggaga

SEQ ID NO: 6096515 - DNA, 25 bp, Homo sapien
acgaacttcctcacttcatcatcgt

SEQ ID NO: 6096516 - DNA, 25 bp, Homo sapien
gcaagttggactctcttgacattct

SEQ ID NO: 6096517 - DNA, 25 bp, Homo sapien
cccttcaggaactggcaggtttact

SEQ ID NO: 6096518 - DNA, 25 bp, Homo sapien
ccgtagaaagttccgcggccgatgg

SEQ ID NO: 6096519 - DNA, 25 bp, Homo sapien
caagatccaatccacaattacacaa

SEQ ID NO: 6096520 - DNA, 25 bp, Homo sapien
ggctgaggtaggtctcggcaagttg

SEQ ID NO: 6096521 - DNA, 25 bp, Homo sapien
tccatcacaagcatgtttccgtatt

SEQ ID NO: 6096522 - DNA, 25 bp, Homo sapien
cctcaaagcaccgaagaaatcgata

SEQ ID NO: 6096523 - DNA, 25 bp, Homo sapien
caagtgtgacaatgtcttcgtcctt

SEQ ID NO: 6096524 - DNA, 25 bp, Homo sapien
gatcaacaagtgtgacaatgtcttc

SEQ ID NO: 6096525 - DNA, 25 bp, Homo sapien
agcttctcataagtcatctcgggtt

SEQ ID NO: 6096526 - DNA, 25 bp, Homo sapien
atcttctcaactccaaggctctcaa

SEQ ID NO: 6096527 - DNA, 25 bp, Homo sapien
cgtcaaaagttgtagacacaggttc

SEQ ID NO: 6096528 - DNA, 25 bp, Homo sapien
gaccagggaactgatcaacaagtgt

SEQ ID NO: 6096529 - DNA, 25 bp, Homo sapien
ggtaggtctcggcaagttggactct

SEQ ID NO: 6096530 - DNA, 25 bp, Homo sapien
tgctcgaacacgggaggtccttccc

SEQ ID NO: 6096531 - DNA, 25 bp, Homo sapien
tcaactccaaggctctcaacgaact

SEQ ID NO: 6096532 - DNA, 25 bp, Homo sapien
atgtttccgtattccataagcttct

SEQ ID NO: 6096533 - DNA, 25 bp, Homo sapien
ggaactgatcaacaagtgtgacaat

SEQ ID NO: 6096534 - DNA, 25 bp, Homo sapien
tcatcgtacactctcgccctcaaag

SEQ ID NO: 6096535 - DNA, 25 bp, Homo sapien
cgttggatcaaagttttcagccaca

SEQ ID NO: 6096536 - DNA, 25 bp, Homo sapien
acaagcatgtttccgtattccataa

SEQ ID NO: 6096537 - DNA, 25 bp, Homo sapien
gtctcggcaagttggactctcttga

SEQ ID NO: 6096538 - DNA, 25 bp, Homo sapien
agttccgcggccgatggcgtcagcg

SEQ ID NO: 6096539 - DNA, 25 bp, Homo sapien
cacaattacacaaaggagaaaaata

SEQ ID NO: 6096540 - DNA, 25 bp, Homo sapien
ccaaggctctcaacgaacttcctca

SEQ ID NO: 6096541 - DNA, 25 bp, Homo sapien
gagcctctttccgatcttctcaact

SEQ ID NO: 6096542 - DNA, 25 bp, Homo sapien
caggataatattcgtcaaaagttgt

SEQ ID NO: 6096543 - DNA, 25 bp, Homo sapien
agtacacccttcaggaactggcagg

SEQ ID NO: 6096544 - DNA, 25 bp, Homo sapien
cagcctggctgaggtaggtctcggc

SEQ ID NO: 6096545 - DNA, 25 bp, Homo sapien
atcgatagattgaccagggaactga

SEQ ID NO: 6096546 - DNA, 25 bp, Homo sapien
ccttgagttaacgagcctctttccg

SEQ ID NO: 6096547 - DNA, 25 bp, Homo sapien
gttttcagccacaggatcagtacac

SEQ ID NO: 6096548 - DNA, 25 bp, Homo sapien
ccatcgtcacttctagccgttggat

SEQ ID NO: 6096549 - DNA, 25 bp, Homo sapien
acattctcttgttccatcacaagca

SEQ ID NO: 6096550 - DNA, 25 bp, Homo sapien
tacactctcgccctcaaagcaccga

SEQ ID NO: 6096551 - DNA, 25 bp, Homo sapien
ccgaagaaatcgatagattgaccag

SEQ ID NO: 6096552 - DNA, 25 bp, Homo sapien
gaaattaataagcaggataatattc

SEQ ID NO: 6096553 - DNA, 25 bp, Homo sapien
gttaacgagcctctttccgatcttc

SEQ ID NO: 6096554 - DNA, 25 bp, Homo sapien
agggaacaaaagaggacaagatcca

SEQ ID NO: 6096555 - DNA, 25 bp, Homo sapien
aacaaaagaggacaagatccaatcc

SEQ ID NO: 6096556 - DNA, 25 bp, Homo sapien
tccataagcttctcataagtcatct

SEQ ID NO: 6096557 - DNA, 25 bp, Homo sapien
agcaccgaagaaatcgatagattga

SEQ ID NO: 6096558 - DNA, 25 bp, Homo sapien
tctcgccctcaaagcaccgaagaaa

SEQ ID NO: 6096559 - DNA, 25 bp, Homo sapien
tctagccgttggatcaaagttttca

SEQ ID NO: 6096560 - DNA, 25 bp, Homo sapien
tagacacaggttccatcgtcacttc

SEQ ID NO: 6096561 - DNA, 25 bp, Homo sapien
aggatcagtacacccttcaggaact

SEQ ID NO: 6096562 - DNA, 25 bp, Homo sapien
tccttcccttgagttaacgagcctc

SEQ ID NO: 6096563 - DNA, 25 bp, Homo sapien
gtcagcgtttgcgtctcccaaagca

SEQ ID NO: 6096564 - DNA, 25 bp, Homo sapien
ccaaagcagcctggctgaggtaggt

SEQ ID NO: 6096565 - DNA, 25 bp, Homo sapien
aaacacgaaattaataagcaggata

SEQ ID NO: 6096566 - DNA, 25 bp, Homo sapien
tcacttctagccgttggatcaaagt

SEQ ID NO: 6096567 - DNA, 25 bp, Homo sapien
gcggccgatggcgtcagcgtttgcg

SEQ ID NO: 6096568 - DNA, 25 bp, Homo sapien
tggcaggtttacttcgtgggctcct

SEQ ID NO: 6096569 - DNA, 25 bp, Homo sapien
tcgggttgctcgaacacgggaggtc

SEQ ID NO: 6096570 - DNA, 25 bp, Homo sapien
ccgtattccataagcttctcataag

SEQ ID NO: 6096571 - DNA, 25 bp, Homo sapien
ctcttgacattctcttgttccatca

SEQ ID NO: 6096572 - DNA, 25 bp, Homo sapien
aataagcaggataatattcgtcaaa

SEQ ID NO: 6096573 - DNA, 25 bp, Homo sapien
aggaactggcaggtttacttcgtgg

SEQ ID NO: 6096574 - DNA, 25 bp, Homo sapien
caaaagagacaataggagtaaaaca

SEQ ID NO: 6096575 - DNA, 25 bp, Homo sapien
tcataagtcatctcgggttgctcga

SEQ ID NO: 6096576 - DNA, 25 bp, Homo sapien
tgacaatgtcttcgtccttgatctt

SEQ ID NO: 6096577 - DNA, 25 bp, Homo sapien
cgtctcccaaagcagcctggctgag

SEQ ID NO: 6096578 - DNA, 25 bp, Homo sapien
agccacaggatcagtacacccttca

SEQ ID NO: 6096579 - DNA, 25 bp, Homo sapien
tgtcttcgtccttgatcttgtcagt

SEQ ID NO: 6096580 - DNA, 25 bp, Homo sapien
cgtccttgatcttgtcagttctgaa

SEQ ID NO: 6096581 - DNA, 25 bp, Homo sapien
ataaaccaaaagagacaataggagt

SEQ ID NO: 6096582 - DNA, 25 bp, Homo sapien
aatattcgtcaaaagttgtagacac

SEQ ID NO: 6096583 - DNA, 25 bp, Homo sapien
tcttgttccatcacaagcatgtttc

SEQ ID NO: 6096584 - DNA, 25 bp, Homo sapien
tttccgatcttctcaactccaaggc

SEQ ID NO: 6096585 - DNA, 25 bp, Homo sapien
agattgaccagggaactgatcaaca

SEQ ID NO: 6096586 - DNA, 25 bp, Homo sapien
caggttccatcgtcacttctagccg

SEQ ID NO: 6096587 - DNA, 25 bp, Homo sapien
tcttggggtccttcgagtatccaag

SEQ ID NO: 6096588 - DNA, 25 bp, Homo sapien
tacttctctggtgctcaacaaatgc

SEQ ID NO: 6096589 - DNA, 25 bp, Homo sapien
tctggtgctcaacaaatgcaatggc

SEQ ID NO: 6096590 - DNA, 25 bp, Homo sapien
aacagcgagcatagcccatctacag

SEQ ID NO: 6096591 - DNA, 25 bp, Homo sapien
ctttcaattcctcgagcttcttggg

SEQ ID NO: 6096592 - DNA, 25 bp, Homo sapien
catatttctatttttacattcatta

SEQ ID NO: 6096593 - DNA, 25 bp, Homo sapien
tctacagtggatgagctctgactct

SEQ ID NO: 6096594 - DNA, 25 bp, Homo sapien
acgccaacagcgcaagccgcccgtt

SEQ ID NO: 6096595 - DNA, 25 bp, Homo sapien
ctacaaacgccaacagcgcaagccg

SEQ ID NO: 6096596 - DNA, 25 bp, Homo sapien
gcacacagaatcctacaaacgccaa

SEQ ID NO: 6096597 - DNA, 25 bp, Homo sapien
agattgtgggcaaagtaccccacgg

SEQ ID NO: 6096598 - DNA, 25 bp, Homo sapien
ttcctcgagcttcttggggtccttc

SEQ ID NO: 6096599 - DNA, 25 bp, Homo sapien
cctgagccttaacccagtttccata

SEQ ID NO: 6096600 - DNA, 25 bp, Homo sapien
ggtacacatatttctatttttacat

SEQ ID NO: 6096601 - DNA, 25 bp, Homo sapien
taaagctcataaggtacacatattt

SEQ ID NO: 6096602 - DNA, 25 bp, Homo sapien
tgccatggatccgccaagtgagttg

SEQ ID NO: 6096603 - DNA, 25 bp, Homo sapien
caatggctaagaactcaatggccaa

SEQ ID NO: 6096604 - DNA, 25 bp, Homo sapien
agaatcctacaaacgccaacagcgc

SEQ ID NO: 6096605 - DNA, 25 bp, Homo sapien
aagccgactgttgcacacagaatcc

SEQ ID NO: 6096606 - DNA, 25 bp, Homo sapien
ttcttcttctcagggtctttctcca

SEQ ID NO: 6096607 - DNA, 25 bp, Homo sapien
cgcaagccgcccgttcttgatctct

SEQ ID NO: 6096608 - DNA, 25 bp, Homo sapien
cagtgtttttgatacacataaagct

SEQ ID NO: 6096609 - DNA, 25 bp, Homo sapien
cttaacccagtttccatatcctaat

SEQ ID NO: 6096610 - DNA, 25 bp, Homo sapien
caaaatcccaggaacagcgagcata

SEQ ID NO: 6096611 - DNA, 25 bp, Homo sapien
gccaagtgagttgccaagttctcca

SEQ ID NO: 6096612 - DNA, 25 bp, Homo sapien
gttcttgatctctttaactttcaat

SEQ ID NO: 6096613 - DNA, 25 bp, Homo sapien
agcccatctacagtggatgagctct

SEQ ID NO: 6096614 - DNA, 25 bp, Homo sapien
caaatgcgcctcccgggtacttctt

SEQ ID NO: 6096615 - DNA, 25 bp, Homo sapien
ggatccgccaagtgagttgccaagt

SEQ ID NO: 6096616 - DNA, 25 bp, Homo sapien
ccattcctgagccttaacccagttt

SEQ ID NO: 6096617 - DNA, 25 bp, Homo sapien
actgttgcacacagaatcctacaaa

SEQ ID NO: 6096618 - DNA, 25 bp, Homo sapien
tgagttgccaagttctccaatggtc

SEQ ID NO: 6096619 - DNA, 25 bp, Homo sapien
aacttctccaagtccaagtgggtca

SEQ ID NO: 6096620 - DNA, 25 bp, Homo sapien
ccgcccgttcttgatctctttaact

SEQ ID NO: 6096621 - DNA, 25 bp, Homo sapien
tcataaggtacacatatttctattt

SEQ ID NO: 6096622 - DNA, 25 bp, Homo sapien
tgaccccctggtagtgctgcccatt

SEQ ID NO: 6096623 - DNA, 25 bp, Homo sapien
gatctctttaactttcaattcctcg

SEQ ID NO: 6096624 - DNA, 25 bp, Homo sapien
tccaagtccaagtgggtcaaaccca

SEQ ID NO: 6096625 - DNA, 25 bp, Homo sapien
ccagtttccatatcctaatgcttct

SEQ ID NO: 6096626 - DNA, 25 bp, Homo sapien
gagctctgactctttgtatctctca

SEQ ID NO: 6096627 - DNA, 25 bp, Homo sapien
agtaagtggcttgaccccctggtag

SEQ ID NO: 6096628 - DNA, 25 bp, Homo sapien
gagcttcttggggtccttcgagtat

SEQ ID NO: 6096629 - DNA, 25 bp, Homo sapien
tttgtatctctcaaggttcgctgga

SEQ ID NO: 6096630 - DNA, 25 bp, Homo sapien
agagggtcaaatgcgcctcccgggt

SEQ ID NO: 6096631 - DNA, 25 bp, Homo sapien
cctggtagtgctgcccattcctgag

SEQ ID NO: 6096632 - DNA, 25 bp, Homo sapien
tacacataaagctcataaggtacac

SEQ ID NO: 6096633 - DNA, 25 bp, Homo sapien
tggtaccaaaatcccaggaacagcg

SEQ ID NO: 6096634 - DNA, 25 bp, Homo sapien
gagcatagcccatctacagtggatg

SEQ ID NO: 6096635 - DNA, 25 bp, Homo sapien
taacaatatcgccaatgttgttgtg

SEQ ID NO: 6096636 - DNA, 25 bp, Homo sapien
atatcgccaatgttgttgtgccatg

SEQ ID NO: 6096637 - DNA, 25 bp, Homo sapien
tttacattcattagttgaaagggat

SEQ ID NO: 6096638 - DNA, 25 bp, Homo sapien
tggcttgaccccctggtagtgctgc

SEQ ID NO: 6096639 - DNA, 25 bp, Homo sapien
tctccaatggtcctgtccccgggta

SEQ ID NO: 6096640 - DNA, 25 bp, Homo sapien
attacacagtgtttttgatacacat

SEQ ID NO: 6096641 - DNA, 25 bp, Homo sapien
tctatttttacattcattagttgaa

SEQ ID NO: 6096642 - DNA, 25 bp, Homo sapien
ctaagaactcaatggccaagattgt

SEQ ID NO: 6096643 - DNA, 25 bp, Homo sapien
ggtctttctccatacttctctggtg

SEQ ID NO: 6096644 - DNA, 25 bp, Homo sapien
cgggtacttcttcttctcagggtct

SEQ ID NO: 6096645 - DNA, 25 bp, Homo sapien
aacagcgcaagccgcccgttcttga

SEQ ID NO: 6096646 - DNA, 25 bp, Homo sapien
gcctcccgggtacttcttcttctca

SEQ ID NO: 6096647 - DNA, 25 bp, Homo sapien
cccaggaacagcgagcatagcccat

SEQ ID NO: 6096648 - DNA, 25 bp, Homo sapien
actcaatggccaagattgtgggcaa

SEQ ID NO: 6096649 - DNA, 25 bp, Homo sapien
gtgctgcccattcctgagccttaac

SEQ ID NO: 6096650 - DNA, 25 bp, Homo sapien
tggccaagattgtgggcaaagtacc

SEQ ID NO: 6096651 - DNA, 25 bp, Homo sapien
aaggttcgctggaacttctccaagt

SEQ ID NO: 6096652 - DNA, 25 bp, Homo sapien
ttcgagtatccaagagggtcaaatg

SEQ ID NO: 6096653 - DNA, 25 bp, Homo sapien
tatccaagagggtcaaatgcgcctc

SEQ ID NO: 6096654 - DNA, 25 bp, Homo sapien
cgctggaacttctccaagtccaagt

SEQ ID NO: 6096655 - DNA, 25 bp, Homo sapien
tgactctttgtatctctcaaggttc

SEQ ID NO: 6096656 - DNA, 25 bp, Homo sapien
ttttgatacacataaagctcataag

SEQ ID NO: 6096657 - DNA, 25 bp, Homo sapien
tctccatacttctctggtgctcaac

SEQ ID NO: 6096658 - DNA, 25 bp, Homo sapien
tgggtttcccaagtaagtggcttga

SEQ ID NO: 6096659 - DNA, 25 bp, Homo sapien
gtggatgagctctgactctttgtat

SEQ ID NO: 6096660 - DNA, 25 bp, Homo sapien
ttgttgtgccatggatccgccaagt

SEQ ID NO: 6096661 - DNA, 25 bp, Homo sapien
tctctcaaggttcgctggaacttct

SEQ ID NO: 6096662 - DNA, 25 bp, Homo sapien
tgcttctggtaccaaaatcccagga

SEQ ID NO: 6096663 - DNA, 25 bp, Homo sapien
tctcagggtctttctccatacttct

SEQ ID NO: 6096664 - DNA, 25 bp, Homo sapien
ccgggtaagccgactgttgcacaca

SEQ ID NO: 6096665 - DNA, 25 bp, Homo sapien
cccaagtaagtggcttgaccccctg

SEQ ID NO: 6096666 - DNA, 25 bp, Homo sapien
agttgaaagggataacaatatcgcc

SEQ ID NO: 6096667 - DNA, 25 bp, Homo sapien
tctttcattacacagtgtttttgat

SEQ ID NO: 6096668 - DNA, 25 bp, Homo sapien
tcctaatgcttctggtaccaaaatc

SEQ ID NO: 6096669 - DNA, 25 bp, Homo sapien
ttcattagttgaaagggataacaat

SEQ ID NO: 6096670 - DNA, 25 bp, Homo sapien
aagggataacaatatcgccaatgtt

SEQ ID NO: 6096671 - DNA, 25 bp, Homo sapien
gccaagttctccaatggtcctgtcc

SEQ ID NO: 6096672 - DNA, 25 bp, Homo sapien
gctcaacaaatgcaatggctaagaa

SEQ ID NO: 6096673 - DNA, 25 bp, Homo sapien
ctgtccccgggtaagccgactgttg

SEQ ID NO: 6096674 - DNA, 25 bp, Homo sapien
ctttaactttcaattcctcgagctt

SEQ ID NO: 6096675 - DNA, 25 bp, Homo sapien
tccatatcctaatgcttctggtacc

SEQ ID NO: 6096676 - DNA, 25 bp, Homo sapien
caaatgcaatggctaagaactcaat

SEQ ID NO: 6096677 - DNA, 25 bp, Homo sapien
ggtccttcgagtatccaagagggtc

SEQ ID NO: 6096678 - DNA, 25 bp, Homo sapien
ccaatgttgttgtgccatggatccg

SEQ ID NO: 6096679 - DNA, 25 bp, Homo sapien
ctgctattcacttctctacattaca

SEQ ID NO: 6096680 - DNA, 25 bp, Homo sapien
acgcgttctatttggcttcgcttcg

SEQ ID NO: 6096681 - DNA, 25 bp, Homo sapien
tccacgagatggttgaaccttcatc

SEQ ID NO: 6096682 - DNA, 25 bp, Homo sapien
acgagcaagtgagtttgcggccgca

SEQ ID NO: 6096683 - DNA, 25 bp, Homo sapien
tctgcacgagcagtggctttgttgg

SEQ ID NO: 6096684 - DNA, 25 bp, Homo sapien
atgtttgagcatttgttgagtgact

SEQ ID NO: 6096685 - DNA, 25 bp, Homo sapien
caggctttttctttttatctccaca

SEQ ID NO: 6096686 - DNA, 25 bp, Homo sapien
tctatttggcttcgcttcgtttgtt

SEQ ID NO: 6096687 - DNA, 25 bp, Homo sapien
cgccatgaaaatccgcggtaaacaa

SEQ ID NO: 6096688 - DNA, 25 bp, Homo sapien
cgaagtaggagtcaggttcgtagtt

SEQ ID NO: 6096689 - DNA, 25 bp, Homo sapien
cgagcagtggctttgttggcaatga

SEQ ID NO: 6096690 - DNA, 25 bp, Homo sapien
gaaaatccgcggtaaacaacgcata

SEQ ID NO: 6096691 - DNA, 25 bp, Homo sapien
cgcggtaaacaacgcataaagaaag

SEQ ID NO: 6096692 - DNA, 25 bp, Homo sapien
ctgcggatggatttatcgacgcgtt

SEQ ID NO: 6096693 - DNA, 25 bp, Homo sapien
ggccgcaaggaatccacgagatggt

SEQ ID NO: 6096694 - DNA, 25 bp, Homo sapien
tgaacttgatgccagggtacgagca

SEQ ID NO: 6096695 - DNA, 25 bp, Homo sapien
tggctttgttggcaatgagctgctc

SEQ ID NO: 6096696 - DNA, 25 bp, Homo sapien
ttgttgagtgacttctccgtagaat

SEQ ID NO: 6096697 - DNA, 25 bp, Homo sapien
tgttggcaatgagctgctcatagag

SEQ ID NO: 6096698 - DNA, 25 bp, Homo sapien
cacgtaaatcagctcgtccagtcta

SEQ ID NO: 6096699 - DNA, 25 bp, Homo sapien
gtagaatttggtcgagaggttgctc

SEQ ID NO: 6096700 - DNA, 25 bp, Homo sapien
ttgttttaggctttagcttctgcac

SEQ ID NO: 6096701 - DNA, 25 bp, Homo sapien
aaggaatccacgagatggttgaacc

SEQ ID NO: 6096702 - DNA, 25 bp, Homo sapien
caggttcgtagttgaacttgatgcc

SEQ ID NO: 6096703 - DNA, 25 bp, Homo sapien
caaattacaaacaagcaagaccgtc

SEQ ID NO: 6096704 - DNA, 25 bp, Homo sapien
tccacacaaattacaaacaagcaag

SEQ ID NO: 6096705 - DNA, 25 bp, Homo sapien
tctctacattacaggctttttcttt

SEQ ID NO: 6096706 - DNA, 25 bp, Homo sapien
tctccaaaactgatacctcatggtc

SEQ ID NO: 6096707 - DNA, 25 bp, Homo sapien
cagtctatcaaattgtccatccatc

SEQ ID NO: 6096708 - DNA, 25 bp, Homo sapien
tcaatccaacaatggtttggaaaag

SEQ ID NO: 6096709 - DNA, 25 bp, Homo sapien
tttatctccacacaaattacaaaca

SEQ ID NO: 6096710 - DNA, 25 bp, Homo sapien
ttatcgacgcgttctatttggcttc

SEQ ID NO: 6096711 - DNA, 25 bp, Homo sapien
taggctttagcttctgcacgagcag

SEQ ID NO: 6096712 - DNA, 25 bp, Homo sapien
ccttttcgccatgaaaatccgcggt

SEQ ID NO: 6096713 - DNA, 25 bp, Homo sapien
tttggtcgagaggttgctcaagtga

SEQ ID NO: 6096714 - DNA, 25 bp, Homo sapien
ttgtccatccatctccaaaactgat

SEQ ID NO: 6096715 - DNA, 25 bp, Homo sapien
agtacttaacaccttccttcattat

SEQ ID NO: 6096716 - DNA, 25 bp, Homo sapien
ttcacttctctacattacaggcttt

SEQ ID NO: 6096717 - DNA, 25 bp, Homo sapien
aagaaactgcggatggatttatcga

SEQ ID NO: 6096718 - DNA, 25 bp, Homo sapien
attgctctgctattcacttctctac

SEQ ID NO: 6096719 - DNA, 25 bp, Homo sapien
atcgaataggtaaaccgggctgaag

SEQ ID NO: 6096720 - DNA, 25 bp, Homo sapien
agtgacttctccgtagaatttggtc

SEQ ID NO: 6096721 - DNA, 25 bp, Homo sapien
gttgttgctacccgggaaatcagca

SEQ ID NO: 6096722 - DNA, 25 bp, Homo sapien
aaactgatacctcatggtcgaagta

SEQ ID NO: 6096723 - DNA, 25 bp, Homo sapien
gtttgcggccgcaaggaatccacga

SEQ ID NO: 6096724 - DNA, 25 bp, Homo sapien
gatctctgatcttcaatccaacaat

SEQ ID NO: 6096725 - DNA, 25 bp, Homo sapien
ttgatgccagggtacgagcaagtga

SEQ ID NO: 6096726 - DNA, 25 bp, Homo sapien
caacaatggtttggaaaagaccagt

SEQ ID NO: 6096727 - DNA, 25 bp, Homo sapien
ttagcttctgcacgagcagtggctt

SEQ ID NO: 6096728 - DNA, 25 bp, Homo sapien
ccagggtacgagcaagtgagtttgc

SEQ ID NO: 6096729 - DNA, 25 bp, Homo sapien
actttccacgtaaatcagctcgtcc

SEQ ID NO: 6096730 - DNA, 25 bp, Homo sapien
ctcgtccagtctatcaaattgtcca

SEQ ID NO: 6096731 - DNA, 25 bp, Homo sapien
caatgagctgctcatagagatctct

SEQ ID NO: 6096732 - DNA, 25 bp, Homo sapien
tggcttcgcttcgtttgttttaggc

SEQ ID NO: 6096733 - DNA, 25 bp, Homo sapien
cgggaaatcagcatgtttgagcatt

SEQ ID NO: 6096734 - DNA, 25 bp, Homo sapien
agaccagtaccgttgttgctacccg

SEQ ID NO: 6096735 - DNA, 25 bp, Homo sapien
agatggttgaaccttcatcgaatag

SEQ ID NO: 6096736 - DNA, 25 bp, Homo sapien
aagcaagaccgtccttttcgccatg

SEQ ID NO: 6096737 - DNA, 25 bp, Homo sapien
caaacaagcaagaccgtccttttcg

SEQ ID NO: 6096738 - DNA, 25 bp, Homo sapien
aaaaagaagaaactgcggatggatt

SEQ ID NO: 6096739 - DNA, 25 bp, Homo sapien
tggaaaagaccagtaccgttgttgc

SEQ ID NO: 6096740 - DNA, 25 bp, Homo sapien
gctacccgggaaatcagcatgtttg

SEQ ID NO: 6096741 - DNA, 25 bp, Homo sapien
ttctccgtagaatttggtcgagagg

SEQ ID NO: 6096742 - DNA, 25 bp, Homo sapien
gcataaagaaagaaagaaataagaa

SEQ ID NO: 6096743 - DNA, 25 bp, Homo sapien
aagtgagtttgcggccgcaaggaat

SEQ ID NO: 6096744 - DNA, 25 bp, Homo sapien
cattacaggctttttctttttatct

SEQ ID NO: 6096745 - DNA, 25 bp, Homo sapien
ctgttattgctctgctattcacttc

SEQ ID NO: 6096746 - DNA, 25 bp, Homo sapien
aatcagctcgtccagtctatcaaat

SEQ ID NO: 6096747 - DNA, 25 bp, Homo sapien
gagcatttgttgagtgacttctccg

SEQ ID NO: 6096748 - DNA, 25 bp, Homo sapien
ttgaaccttcatcgaataggtaaac

SEQ ID NO: 6096749 - DNA, 25 bp, Homo sapien
gaccgtccttttcgccatgaaaatc

SEQ ID NO: 6096750 - DNA, 25 bp, Homo sapien
gctgctcatagagatctctgatctt

SEQ ID NO: 6096751 - DNA, 25 bp, Homo sapien
tgatcttcaatccaacaatggtttg

SEQ ID NO: 6096752 - DNA, 25 bp, Homo sapien
atacctcatggtcgaagtaggagtc

SEQ ID NO: 6096753 - DNA, 25 bp, Homo sapien
tttctttttatctccacacaaatta

SEQ ID NO: 6096754 - DNA, 25 bp, Homo sapien
cgagaggttgctcaagtgactttcc

SEQ ID NO: 6096755 - DNA, 25 bp, Homo sapien
catagagatctctgatcttcaatcc

SEQ ID NO: 6096756 - DNA, 25 bp, Homo sapien
cttcatcgaataggtaaaccgggct

SEQ ID NO: 6096757 - DNA, 25 bp, Homo sapien
atccatctccaaaactgatacctca

SEQ ID NO: 6096758 - DNA, 25 bp, Homo sapien
gttgctcaagtgactttccacgtaa

SEQ ID NO: 6096759 - DNA, 25 bp, Homo sapien
atcaaattgtccatccatctccaaa

SEQ ID NO: 6096760 - DNA, 25 bp, Homo sapien
gctgaagtacttaacaccttccttc

SEQ ID NO: 6096761 - DNA, 25 bp, Homo sapien
caagtgactttccacgtaaatcagc

SEQ ID NO: 6096762 - DNA, 25 bp, Homo sapien
atcagcatgtttgagcatttgttga

SEQ ID NO: 6096763 - DNA, 25 bp, Homo sapien
atggatttatcgacgcgttctattt

SEQ ID NO: 6096764 - DNA, 25 bp, Homo sapien
catggtcgaagtaggagtcaggttc

SEQ ID NO: 6096765 - DNA, 25 bp, Homo sapien
cgtagttgaacttgatgccagggta

SEQ ID NO: 6096766 - DNA, 25 bp, Homo sapien
acaacgcataaagaaagaaagaaat

SEQ ID NO: 6096767 - DNA, 25 bp, Homo sapien
aggagtcaggttcgtagttgaactt

SEQ ID NO: 6096768 - DNA, 25 bp, Homo sapien
tgattcaattactatgaaacgttgg

SEQ ID NO: 6096769 - DNA, 25 bp, Homo sapien
agcccgtacgaggaaagcgaagatg

SEQ ID NO: 6096770 - DNA, 25 bp, Homo sapien
ctcggtacgttacagcgaattggat

SEQ ID NO: 6096771 - DNA, 25 bp, Homo sapien
aagatgggcaagcaggcgttccaga

SEQ ID NO: 6096772 - DNA, 25 bp, Homo sapien
cgttccagacgtcatgttacgtcga

SEQ ID NO: 6096773 - DNA, 25 bp, Homo sapien
ttgaaaacagggcagactctgcgcc

SEQ ID NO: 6096774 - DNA, 25 bp, Homo sapien
gcggatagggactcgactatgcatc

SEQ ID NO: 6096775 - DNA, 25 bp, Homo sapien
tatagtcaaggagttggtatgctac

SEQ ID NO: 6096776 - DNA, 25 bp, Homo sapien
cctgattcgggggcatttgaatgta

SEQ ID NO: 6096777 - DNA, 25 bp, Homo sapien
tcgactatgcatccgagagtaagcg

SEQ ID NO: 6096778 - DNA, 25 bp, Homo sapien
tggaagctcggtacgttacagcgaa

SEQ ID NO: 6096779 - DNA, 25 bp, Homo sapien
agggactcgactatgcatccgagag

SEQ ID NO: 6096780 - DNA, 25 bp, Homo sapien
gaaagcgaagatgggcaagcaggcg

SEQ ID NO: 6096781 - DNA, 25 bp, Homo sapien
tgttcgaagagacgttccgacttct

SEQ ID NO: 6096782 - DNA, 25 bp, Homo sapien
agcaggcgttccagacgtcatgtta

SEQ ID NO: 6096783 - DNA, 25 bp, Homo sapien
gcatttgaatgtatcaaattgggaa

SEQ ID NO: 6096784 - DNA, 25 bp, Homo sapien
caaggagttggtatgctacgctgat

SEQ ID NO: 6096785 - DNA, 25 bp, Homo sapien
cgattcagcccgtacgaggaaagcg

SEQ ID NO: 6096786 - DNA, 25 bp, Homo sapien
gtcctgacatgatccagttgaaaac

SEQ ID NO: 6096787 - DNA, 25 bp, Homo sapien
agaggacgcatgttcctgattcggg

SEQ ID NO: 6096788 - DNA, 25 bp, Homo sapien
cgagagtaagcggatactctaatcc

SEQ ID NO: 6096789 - DNA, 25 bp, Homo sapien
agacgtcatgttacgtcgagtaccg

SEQ ID NO: 6096790 - DNA, 25 bp, Homo sapien
tgcatccgagagtaagcggatactc

SEQ ID NO: 6096791 - DNA, 25 bp, Homo sapien
catgttacgtcgagtaccgaaaggg

SEQ ID NO: 6096792 - DNA, 25 bp, Homo sapien
tccagttgaaaacagggcagactct

SEQ ID NO: 6096793 - DNA, 25 bp, Homo sapien
gcctaccgattcagcccgtacgagg

SEQ ID NO: 6096794 - DNA, 25 bp, Homo sapien
gtctaatcagtgtgttcgaagagac

SEQ ID NO: 6096795 - DNA, 25 bp, Homo sapien
cagtttccgccctctctagaacggt

SEQ ID NO: 6096796 - DNA, 25 bp, Homo sapien
cgctgatggtcacctaaagttctta

SEQ ID NO: 6096797 - DNA, 25 bp, Homo sapien
cgccctctctagaacggttaaggag

SEQ ID NO: 6096798 - DNA, 25 bp, Homo sapien
gaacggttaaggagtagcagtacta

SEQ ID NO: 6096799 - DNA, 25 bp, Homo sapien
agacccggtacgcctaccgattcag

SEQ ID NO: 6096800 - DNA, 25 bp, Homo sapien
acgttggaagctcggtacgttacag

SEQ ID NO: 6096801 - DNA, 25 bp, Homo sapien
cctaaagttcttagaggacgcatgt

SEQ ID NO: 6096802 - DNA, 25 bp, Homo sapien
gaatgtatcaaattgggaaattaca

SEQ ID NO: 6096803 - DNA, 25 bp, Homo sapien
tcgggggcatttgaatgtatcaaat

SEQ ID NO: 6096804 - DNA, 25 bp, Homo sapien
tacgaggaaagcgaagatgggcaag

SEQ ID NO: 6096805 - DNA, 25 bp, Homo sapien
cagcgaattggattgcagtatagtc

SEQ ID NO: 6096806 - DNA, 25 bp, Homo sapien
aattactatgaaacgttggaagctc

SEQ ID NO: 6096807 - DNA, 25 bp, Homo sapien
acgttacagcgaattggattgcagt

SEQ ID NO: 6096808 - DNA, 25 bp, Homo sapien
gcatgttcctgattcgggggcattt

SEQ ID NO: 6096809 - DNA, 25 bp, Homo sapien
gggcaagcaggcgttccagacgtca

SEQ ID NO: 6096810 - DNA, 25 bp, Homo sapien
ccgaccgtcctgacatgatccagtt

SEQ ID NO: 6096811 - DNA, 25 bp, Homo sapien
tcagtgtgttcgaagagacgttccg

SEQ ID NO: 6096812 - DNA, 25 bp, Homo sapien
atcaaattgggaaattacaggcggg

SEQ ID NO: 6096813 - DNA, 25 bp, Homo sapien
atgctacgctgatggtcacctaaag

SEQ ID NO: 6096814 - DNA, 25 bp, Homo sapien
tactaccgtaaatactcgtctaatc

SEQ ID NO: 6096815 - DNA, 25 bp, Homo sapien
aattacaggcgggcggatagggact

SEQ ID NO: 6096816 - DNA, 25 bp, Homo sapien
gacggtcagtttccgccctctctag

SEQ ID NO: 6096817 - DNA, 25 bp, Homo sapien
tatgaaacgttggaagctcggtacg

SEQ ID NO: 6096818 - DNA, 25 bp, Homo sapien
tcataacttcagacccggtacgcct

SEQ ID NO: 6096819 - DNA, 25 bp, Homo sapien
cttcagacccggtacgcctaccgat

SEQ ID NO: 6096820 - DNA, 25 bp, Homo sapien
gttggtatgctacgctgatggtcac

SEQ ID NO: 6096821 - DNA, 25 bp, Homo sapien
ttgcagtatagtcaaggagttggta

SEQ ID NO: 6096822 - DNA, 25 bp, Homo sapien
taaggagtagcagtactaccgtaaa

SEQ ID NO: 6096823 - DNA, 25 bp, Homo sapien
agagacgttccgacttcttgattca

SEQ ID NO: 6096824 - DNA, 25 bp, Homo sapien
ggtacgcctaccgattcagcccgta

SEQ ID NO: 6096825 - DNA, 25 bp, Homo sapien
atactcgtctaatcagtgtgttcga

SEQ ID NO: 6096826 - DNA, 25 bp, Homo sapien
acttcttgattcaattactatgaaa

SEQ ID NO: 6096827 - DNA, 25 bp, Homo sapien
ttgggaaattacaggcgggcggata

SEQ ID NO: 6096828 - DNA, 25 bp, Homo sapien
tctctagaacggttaaggagtagca

SEQ ID NO: 6096829 - DNA, 25 bp, Homo sapien
gtagcagtactaccgtaaatactcg

SEQ ID NO: 6096830 - DNA, 25 bp, Homo sapien
gttcttagaggacgcatgttcctga

SEQ ID NO: 6096831 - DNA, 25 bp, Homo sapien
ctaatcccgaccgtcctgacatgat

SEQ ID NO: 6096832 - DNA, 25 bp, Homo sapien
aggcgggcggatagggactcgacta

SEQ ID NO: 6096833 - DNA, 25 bp, Homo sapien
tggtcacctaaagttcttagaggac

SEQ ID NO: 6096834 - DNA, 25 bp, Homo sapien
ggatactctaatcccgaccgtcctg

SEQ ID NO: 6096835 - DNA, 25 bp, Homo sapien
gtaagcggatactctaatcccgacc

SEQ ID NO: 6096836 - DNA, 25 bp, Homo sapien
attggattgcagtatagtcaaggag

SEQ ID NO: 6096837 - DNA, 25 bp, Homo sapien
gttccgacttcttgattcaattact

SEQ ID NO: 6096838 - DNA, 25 bp, Homo sapien
ccgtaaatactcgtctaatcagtgt

SEQ ID NO: 6096839 - DNA, 25 bp, Homo sapien
acatgatccagttgaaaacagggca

SEQ ID NO: 6096840 - DNA, 25 bp, Homo sapien
cgtgctctagttactgctggtacct

SEQ ID NO: 6096841 - DNA, 25 bp, Homo sapien
tccctgtttaagtcgaggcaattta

SEQ ID NO: 6096842 - DNA, 25 bp, Homo sapien
cccagttgtagtaggacacccagac

SEQ ID NO: 6096843 - DNA, 25 bp, Homo sapien
tttggtcgaagacgtgctctagtta

SEQ ID NO: 6096844 - DNA, 25 bp, Homo sapien
gtcaagtgtacgttgtcctagtaga

SEQ ID NO: 6096845 - DNA, 25 bp, Homo sapien
gaggctgcaatatccagatttggtc

SEQ ID NO: 6096846 - DNA, 25 bp, Homo sapien
gtagtacgatccctaatctcagacc

SEQ ID NO: 6096847 - DNA, 25 bp, Homo sapien
tacatcattcaccgtcgagcaccaa

SEQ ID NO: 6096848 - DNA, 25 bp, Homo sapien
acggctacagtaggaatcgaattga

SEQ ID NO: 6096849 - DNA, 25 bp, Homo sapien
gctacacccagttgtagtaggacac

SEQ ID NO: 6096850 - DNA, 25 bp, Homo sapien
cgtcgagcaccaacggctacagtag

SEQ ID NO: 6096851 - DNA, 25 bp, Homo sapien
cctaatctcagaccgtcctcttgca

SEQ ID NO: 6096852 - DNA, 25 bp, Homo sapien
cgcctccgttagtctcgaccaacac

SEQ ID NO: 6096853 - DNA, 25 bp, Homo sapien
cacaacccgttgtagtacgatccct

SEQ ID NO: 6096854 - DNA, 25 bp, Homo sapien
tacgacgaggctgcaatatccagat

SEQ ID NO: 6096855 - DNA, 25 bp, Homo sapien
cactcacttcttacgactcaagcgg

SEQ ID NO: 6096856 - DNA, 25 bp, Homo sapien
cgttagtctcgaccaacacattatt

SEQ ID NO: 6096857 - DNA, 25 bp, Homo sapien
atctaacactcacttcttacgactc

SEQ ID NO: 6096858 - DNA, 25 bp, Homo sapien
acgactcaagcggtacgacagtcac

SEQ ID NO: 6096859 - DNA, 25 bp, Homo sapien
acagtaggaatcgaattgagtgcag

SEQ ID NO: 6096860 - DNA, 25 bp, Homo sapien
cgacgatcctccgaaatgaaggtgc

SEQ ID NO: 6096861 - DNA, 25 bp, Homo sapien
tccagatttggtcgaagacgtgctc

SEQ ID NO: 6096862 - DNA, 25 bp, Homo sapien
cgccaggcgcctccgttagtctcga

SEQ ID NO: 6096863 - DNA, 25 bp, Homo sapien
ccgtcctcttgcagaggttgcgctc

SEQ ID NO: 6096864 - DNA, 25 bp, Homo sapien
cgaccgcaatgacagtgttaggctg

SEQ ID NO: 6096865 - DNA, 25 bp, Homo sapien
cgaaatgaaggtgcgaggctacgac

SEQ ID NO: 6096866 - DNA, 25 bp, Homo sapien
tctcgaccaacacattattcgaaaa

SEQ ID NO: 6096867 - DNA, 25 bp, Homo sapien
aaggtgcgaggctacgacgaggctg

SEQ ID NO: 6096868 - DNA, 25 bp, Homo sapien
gaattgagtgcagtttctgcgccag

SEQ ID NO: 6096869 - DNA, 25 bp, Homo sapien
agaggttgcgctcatttctacaacg

SEQ ID NO: 6096870 - DNA, 25 bp, Homo sapien
ccaacacattattcgaaaatctaac

SEQ ID NO: 6096871 - DNA, 25 bp, Homo sapien
caatgacagtgttaggctgctacac

SEQ ID NO: 6096872 - DNA, 25 bp, Homo sapien
ttggctcgaccgcaatgacagtgtt

SEQ ID NO: 6096873 - DNA, 25 bp, Homo sapien
ggtacgacagtcacctcgacgaata

SEQ ID NO: 6096874 - DNA, 25 bp, Homo sapien
ctagttactgctggtacctacatca

SEQ ID NO: 6096875 - DNA, 25 bp, Homo sapien
tcttgcagaggttgcgctcatttct

SEQ ID NO: 6096876 - DNA, 25 bp, Homo sapien
tcgaaaatctaacactcacttctta

SEQ ID NO: 6096877 - DNA, 25 bp, Homo sapien
aatttacacaaagtcaggtacgagt

SEQ ID NO: 6096878 - DNA, 25 bp, Homo sapien
cctcgacgaatacacaacccgttgt

SEQ ID NO: 6096879 - DNA, 25 bp, Homo sapien
cccgttgtagtacgatccctaatct

SEQ ID NO: 6096880 - DNA, 25 bp, Homo sapien
tgtagtaggacacccagacgaactc

SEQ ID NO: 6096881 - DNA, 25 bp, Homo sapien
cattattcgaaaatctaacactcac

SEQ ID NO: 6096882 - DNA, 25 bp, Homo sapien
acagtcacctcgacgaatacacaac

SEQ ID NO: 6096883 - DNA, 25 bp, Homo sapien
cacaaagtcaggtacgagttggctc

SEQ ID NO: 6096884 - DNA, 25 bp, Homo sapien
cccagacgaactcgacgatcctccg

SEQ ID NO: 6096885 - DNA, 25 bp, Homo sapien
ggaatcgaattgagtgcagtttctg

SEQ ID NO: 6096886 - DNA, 25 bp, Homo sapien
tgtacgttgtcctagtagaagacgt

SEQ ID NO: 6096887 - DNA, 25 bp, Homo sapien
tacgagttggctcgaccgcaatgac

SEQ ID NO: 6096888 - DNA, 25 bp, Homo sapien
cagtgttaggctgctacacccagtt

SEQ ID NO: 6096889 - DNA, 25 bp, Homo sapien
cgaagacgtgctctagttactgctg

SEQ ID NO: 6096890 - DNA, 25 bp, Homo sapien
acgatccctaatctcagaccgtcct

SEQ ID NO: 6096891 - DNA, 25 bp, Homo sapien
atcctccgaaatgaaggtgcgaggc

SEQ ID NO: 6096892 - DNA, 25 bp, Homo sapien
ggtacctacatcattcaccgtcgag

SEQ ID NO: 6096893 - DNA, 25 bp, Homo sapien
cgaactcgacgatcctccgaaatga

SEQ ID NO: 6096894 - DNA, 25 bp, Homo sapien
gtttctgcgccaggcgcctccgtta

SEQ ID NO: 6096895 - DNA, 25 bp, Homo sapien
gtcaggtacgagttggctcgaccgc

SEQ ID NO: 6096896 - DNA, 25 bp, Homo sapien
cgaggctacgacgaggctgcaatat

SEQ ID NO: 6096897 - DNA, 25 bp, Homo sapien
taggctgctacacccagttgtagta

SEQ ID NO: 6096898 - DNA, 25 bp, Homo sapien
gcaatatccagatttggtcgaagac

SEQ ID NO: 6096899 - DNA, 25 bp, Homo sapien
cgaggcaatttacacaaagtcaggt

SEQ ID NO: 6096900 - DNA, 25 bp, Homo sapien
tgtcctagtagaagacgtttccctg

SEQ ID NO: 6096901 - DNA, 25 bp, Homo sapien
gcaccaacggctacagtaggaatcg

SEQ ID NO: 6096902 - DNA, 25 bp, Homo sapien
actgctggtacctacatcattcacc

SEQ ID NO: 6096903 - DNA, 25 bp, Homo sapien
attcaccgtcgagcaccaacggcta

SEQ ID NO: 6096904 - DNA, 25 bp, Homo sapien
agtgcagtttctgcgccaggcgcct

SEQ ID NO: 6096905 - DNA, 25 bp, Homo sapien
ctcagaccgtcctcttgcagaggtt

SEQ ID NO: 6096906 - DNA, 25 bp, Homo sapien
tgcgctcatttctacaacgcggcac

SEQ ID NO: 6096907 - DNA, 25 bp, Homo sapien
ttaagtcgaggcaatttacacaaag

SEQ ID NO: 6096908 - DNA, 25 bp, Homo sapien
tcaagcggtacgacagtcacctcga

SEQ ID NO: 6096909 - DNA, 25 bp, Homo sapien
aggacacccagacgaactcgacgat

SEQ ID NO: 6096910 - DNA, 25 bp, Homo sapien
cgaatacacaacccgttgtagtacg

SEQ ID NO: 6096911 - DNA, 25 bp, Homo sapien
cttcttacgactcaagcggtacgac

SEQ ID NO: 6096912 - DNA, 25 bp, Homo sapien
gctagtgcggcaagtttctttcgat

SEQ ID NO: 6096913 - DNA, 25 bp, Homo sapien
gatgatcgtaccaggcctggactca

SEQ ID NO: 6096914 - DNA, 25 bp, Homo sapien
ataccctagctgagggtggactata

SEQ ID NO: 6096915 - DNA, 25 bp, Homo sapien
cggtcatcaccacccaagcgggcga

SEQ ID NO: 6096916 - DNA, 25 bp, Homo sapien
cccaagcgggcgaaatctgagtatg

SEQ ID NO: 6096917 - DNA, 25 bp, Homo sapien
tgccgtcgctagacatacactagcc

SEQ ID NO: 6096918 - DNA, 25 bp, Homo sapien
tcgtgtacttcggtcacgtccgtta

SEQ ID NO: 6096919 - DNA, 25 bp, Homo sapien
tcgtcgtcgtgtacttcggtcacgt

SEQ ID NO: 6096920 - DNA, 25 bp, Homo sapien
agtttctttcgatcgtcgtcgtgta

SEQ ID NO: 6096921 - DNA, 25 bp, Homo sapien
ctagtgtctctatgagcgctgagcc

SEQ ID NO: 6096922 - DNA, 25 bp, Homo sapien
agtcaaacactttcttttgccgtcg

SEQ ID NO: 6096923 - DNA, 25 bp, Homo sapien
ttattagtcgtatcaactctagtgt

SEQ ID NO: 6096924 - DNA, 25 bp, Homo sapien
tacggtaatcaacagggggtgaggc

SEQ ID NO: 6096925 - DNA, 25 bp, Homo sapien
acttgacaagctagaagaggtacgg

SEQ ID NO: 6096926 - DNA, 25 bp, Homo sapien
ccctatattgcaagtcaaacacttt

SEQ ID NO: 6096927 - DNA, 25 bp, Homo sapien
aataccactacgacacccgctagtg

SEQ ID NO: 6096928 - DNA, 25 bp, Homo sapien
gctagacatacactagccccgcaca

SEQ ID NO: 6096929 - DNA, 25 bp, Homo sapien
ttcgggtcaagcttattagtcgtat

SEQ ID NO: 6096930 - DNA, 25 bp, Homo sapien
aaatctgagtatggctgcgaattgc

SEQ ID NO: 6096931 - DNA, 25 bp, Homo sapien
ctgagccgcaactttggttcctatt

SEQ ID NO: 6096932 - DNA, 25 bp, Homo sapien
gattatacttgacaagctagaagag

SEQ ID NO: 6096933 - DNA, 25 bp, Homo sapien
gactcacctgttgattatacttgac

SEQ ID NO: 6096934 - DNA, 25 bp, Homo sapien
tcggtcacgtccgttaactcagccg

SEQ ID NO: 6096935 - DNA, 25 bp, Homo sapien
gttaactcagccgagacgatgatcg

SEQ ID NO: 6096936 - DNA, 25 bp, Homo sapien
aacactttcttttgccgtcgctaga

SEQ ID NO: 6096937 - DNA, 25 bp, Homo sapien
tattccaaagttccctatattgcaa

SEQ ID NO: 6096938 - DNA, 25 bp, Homo sapien
tacttcggtcacgtccgttaactca

SEQ ID NO: 6096939 - DNA, 25 bp, Homo sapien
gactatatgatctcgtcgtgataat

SEQ ID NO: 6096940 - DNA, 25 bp, Homo sapien
tcaagcttattagtcgtatcaactc

SEQ ID NO: 6096941 - DNA, 25 bp, Homo sapien
ttcttttgccgtcgctagacataca

SEQ ID NO: 6096942 - DNA, 25 bp, Homo sapien
tgagcgctgagccgcaactttggtt

SEQ ID NO: 6096943 - DNA, 25 bp, Homo sapien
tcgtcgtgataattcgggtcaagct

SEQ ID NO: 6096944 - DNA, 25 bp, Homo sapien
acacccgctagtgcggcaagtttct

SEQ ID NO: 6096945 - DNA, 25 bp, Homo sapien
caagctagaagaggtacggtaatca

SEQ ID NO: 6096946 - DNA, 25 bp, Homo sapien
cgcaactttggttcctattccaaag

SEQ ID NO: 6096947 - DNA, 25 bp, Homo sapien
ggtagcggaagggttgtatgtcaga

SEQ ID NO: 6096948 - DNA, 25 bp, Homo sapien
ccgcacaataccactacgacacccg

SEQ ID NO: 6096949 - DNA, 25 bp, Homo sapien
cgggcgaaatctgagtatggctgcg

SEQ ID NO: 6096950 - DNA, 25 bp, Homo sapien
agaagaggtacggtaatcaacaggg

SEQ ID NO: 6096951 - DNA, 25 bp, Homo sapien
tctctatgagcgctgagccgcaact

SEQ ID NO: 6096952 - DNA, 25 bp, Homo sapien
atgtcagatgcagaatgcataccct

SEQ ID NO: 6096953 - DNA, 25 bp, Homo sapien
cggaagggttgtatgtcagatgcag

SEQ ID NO: 6096954 - DNA, 25 bp, Homo sapien
tgataattcgggtcaagcttattag

SEQ ID NO: 6096955 - DNA, 25 bp, Homo sapien
atgatctcgtcgtgataattcgggt

SEQ ID NO: 6096956 - DNA, 25 bp, Homo sapien
aaagttccctatattgcaagtcaaa

SEQ ID NO: 6096957 - DNA, 25 bp, Homo sapien
ctacgacacccgctagtgcggcaag

SEQ ID NO: 6096958 - DNA, 25 bp, Homo sapien
gagtatggctgcgaattgccctcat

SEQ ID NO: 6096959 - DNA, 25 bp, Homo sapien
tggctgcgaattgccctcataacac

SEQ ID NO: 6096960 - DNA, 25 bp, Homo sapien
ataacacttgatatgagtaggggta

SEQ ID NO: 6096961 - DNA, 25 bp, Homo sapien
atgagtaggggtagcggaagggttg

SEQ ID NO: 6096962 - DNA, 25 bp, Homo sapien
tagctgagggtggactatatgatct

SEQ ID NO: 6096963 - DNA, 25 bp, Homo sapien
cttgatatgagtaggggtagcggaa

SEQ ID NO: 6096964 - DNA, 25 bp, Homo sapien
gccctcataacacttgatatgagta

SEQ ID NO: 6096965 - DNA, 25 bp, Homo sapien
cctgttgattatacttgacaagcta

SEQ ID NO: 6096966 - DNA, 25 bp, Homo sapien
ggcctggactcacctgttgattata

SEQ ID NO: 6096967 - DNA, 25 bp, Homo sapien
gatgcagaatgcataccctagctga

SEQ ID NO: 6096968 - DNA, 25 bp, Homo sapien
acgtccgttaactcagccgagacga

SEQ ID NO: 6096969 - DNA, 25 bp, Homo sapien
cgaattgccctcataacacttgata

SEQ ID NO: 6096970 - DNA, 25 bp, Homo sapien
gcggcaagtttctttcgatcgtcgt

SEQ ID NO: 6096971 - DNA, 25 bp, Homo sapien
gtaccaggcctggactcacctgttg

SEQ ID NO: 6096972 - DNA, 25 bp, Homo sapien
catacactagccccgcacaatacca

SEQ ID NO: 6096973 - DNA, 25 bp, Homo sapien
agggtggactatatgatctcgtcgt

SEQ ID NO: 6096974 - DNA, 25 bp, Homo sapien
attgcaagtcaaacactttcttttg

SEQ ID NO: 6096975 - DNA, 25 bp, Homo sapien
tcaactctagtgtctctatgagcgc

SEQ ID NO: 6096976 - DNA, 25 bp, Homo sapien
aatcaacagggggtgaggctgtaac

SEQ ID NO: 6096977 - DNA, 25 bp, Homo sapien
cgagacgatgatcgtaccaggcctg

SEQ ID NO: 6096978 - DNA, 25 bp, Homo sapien
tttcgatcgtcgtcgtgtacttcgg

SEQ ID NO: 6096979 - DNA, 25 bp, Homo sapien
ctagccccgcacaataccactacga

SEQ ID NO: 6096980 - DNA, 25 bp, Homo sapien
gaatgcataccctagctgagggtgg

SEQ ID NO: 6096981 - DNA, 25 bp, Homo sapien
ggttgtatgtcagatgcagaatgca

SEQ ID NO: 6096982 - DNA, 25 bp, Homo sapien
atcaccacccaagcgggcgaaatct

SEQ ID NO: 6096983 - DNA, 25 bp, Homo sapien
gtcgtatcaactctagtgtctctat

SEQ ID NO: 6096984 - DNA, 25 bp, Homo sapien
ctcagccgagacgatgatcgtacca

SEQ ID NO: 6096985 - DNA, 25 bp, Homo sapien
gacccccatatactcgacacatcga

SEQ ID NO: 6096986 - DNA, 25 bp, Homo sapien
aggtagcatccgcacccatcatccg

SEQ ID NO: 6096987 - DNA, 25 bp, Homo sapien
tcgtgcacatgtcgagtttgatttt

SEQ ID NO: 6096988 - DNA, 25 bp, Homo sapien
aggtacaaacactccagtccggatg

SEQ ID NO: 6096989 - DNA, 25 bp, Homo sapien
gtatctatcaacagtcaagcgcaac

SEQ ID NO: 6096990 - DNA, 25 bp, Homo sapien
cgaggcgcctgatgtgctcgacccc

SEQ ID NO: 6096991 - DNA, 25 bp, Homo sapien
taaaatattgaaggtacaaacactc

SEQ ID NO: 6096992 - DNA, 25 bp, Homo sapien
gtggagacgcactaggaacagcctt

SEQ ID NO: 6096993 - DNA, 25 bp, Homo sapien
accgaacgaggcgcctgatgtgctc

SEQ ID NO: 6096994 - DNA, 25 bp, Homo sapien
taaacacctcagactggacactata

SEQ ID NO: 6096995 - DNA, 25 bp, Homo sapien
tagtccatgatataacaagaacgcg

SEQ ID NO: 6096996 - DNA, 25 bp, Homo sapien
catccgcacccatcatccgacccgg

SEQ ID NO: 6096997 - DNA, 25 bp, Homo sapien
tctggtcgtttcttaagatgtgcgt

SEQ ID NO: 6096998 - DNA, 25 bp, Homo sapien
actggacactatatacgactcgtat

SEQ ID NO: 6096999 - DNA, 25 bp, Homo sapien
gtcctggttgcggggttgacgagta

SEQ ID NO: 6097000 - DNA, 25 bp, Homo sapien
cactatatacgactcgtattttggg

SEQ ID NO: 6097001 - DNA, 25 bp, Homo sapien
tcatccgacccggggtcatgttaaa

SEQ ID NO: 6097002 - DNA, 25 bp, Homo sapien
aaacactccagtccggatgtctggt

SEQ ID NO: 6097003 - DNA, 25 bp, Homo sapien
tcatgttaaaatattgaaggtacaa

SEQ ID NO: 6097004 - DNA, 25 bp, Homo sapien
tgacgagtatctatcaacagtcaag

SEQ ID NO: 6097005 - DNA, 25 bp, Homo sapien
ctcgacacatcgaggtagcatccgc

SEQ ID NO: 6097006 - DNA, 25 bp, Homo sapien
cgcacagacttgtagtccatgatat

SEQ ID NO: 6097007 - DNA, 25 bp, Homo sapien
tattgaaggtacaaacactccagtc

SEQ ID NO: 6097008 - DNA, 25 bp, Homo sapien
tgaacacgtgaagtggagacgcact

SEQ ID NO: 6097009 - DNA, 25 bp, Homo sapien
taacaagaacgcgaccacaccgaac

SEQ ID NO: 6097010 - DNA, 25 bp, Homo sapien
catatactcgacacatcgaggtagc

SEQ ID NO: 6097011 - DNA, 25 bp, Homo sapien
aatgtaaatgattggctccaaccat

SEQ ID NO: 6097012 - DNA, 25 bp, Homo sapien
caaccattatatggccataactgcc

SEQ ID NO: 6097013 - DNA, 25 bp, Homo sapien
ctcgtattttgggctcggggtcctg

SEQ ID NO: 6097014 - DNA, 25 bp, Homo sapien
tccgcctcagacaatgtaaatgatt

SEQ ID NO: 6097015 - DNA, 25 bp, Homo sapien
cctcagactggacactatatacgac

SEQ ID NO: 6097016 - DNA, 25 bp, Homo sapien
ctgatgtgctcgacccccatatact

SEQ ID NO: 6097017 - DNA, 25 bp, Homo sapien
gtgctcgacccccatatactcgaca

SEQ ID NO: 6097018 - DNA, 25 bp, Homo sapien
atcaacagtcaagcgcaactgaaca

SEQ ID NO: 6097019 - DNA, 25 bp, Homo sapien
tatatggccataactgccgatgtgt

SEQ ID NO: 6097020 - DNA, 25 bp, Homo sapien
ccggggtcatgttaaaatattgaag

SEQ ID NO: 6097021 - DNA, 25 bp, Homo sapien
agccttcagcattcaccccgttctt

SEQ ID NO: 6097022 - DNA, 25 bp, Homo sapien
ttaagatgtgcgtccgcctcagaca

SEQ ID NO: 6097023 - DNA, 25 bp, Homo sapien
aatgattggctccaaccattatatg

SEQ ID NO: 6097024 - DNA, 25 bp, Homo sapien
aactgccgatgtgtcgagtaaacac

SEQ ID NO: 6097025 - DNA, 25 bp, Homo sapien
tgattttgagacgtgctcacagttt

SEQ ID NO: 6097026 - DNA, 25 bp, Homo sapien
cgttcttttgaaaccatatcgtgca

SEQ ID NO: 6097027 - DNA, 25 bp, Homo sapien
cgcaactgaacacgtgaagtggaga

SEQ ID NO: 6097028 - DNA, 25 bp, Homo sapien
tggctccaaccattatatggccata

SEQ ID NO: 6097029 - DNA, 25 bp, Homo sapien
gaccacaccgaacgaggcgcctgat

SEQ ID NO: 6097030 - DNA, 25 bp, Homo sapien
cagcattcaccccgttcttttgaaa

SEQ ID NO: 6097031 - DNA, 25 bp, Homo sapien
gccataactgccgatgtgtcgagta

SEQ ID NO: 6097032 - DNA, 25 bp, Homo sapien
cgagtttgattttgagacgtgctca

SEQ ID NO: 6097033 - DNA, 25 bp, Homo sapien
cgtttcttaagatgtgcgtccgcct

SEQ ID NO: 6097034 - DNA, 25 bp, Homo sapien
cgtgaagtggagacgcactaggaac

SEQ ID NO: 6097035 - DNA, 25 bp, Homo sapien
gacttgtagtccatgatataacaag

SEQ ID NO: 6097036 - DNA, 25 bp, Homo sapien
gaacgcgaccacaccgaacgaggcg

SEQ ID NO: 6097037 - DNA, 25 bp, Homo sapien
cgatgtgtcgagtaaacacctcaga

SEQ ID NO: 6097038 - DNA, 25 bp, Homo sapien
acatgtcgagtttgattttgagacg

SEQ ID NO: 6097039 - DNA, 25 bp, Homo sapien
tcagacaatgtaaatgattggctcc

SEQ ID NO: 6097040 - DNA, 25 bp, Homo sapien
taggaacagccttcagcattcaccc

SEQ ID NO: 6097041 - DNA, 25 bp, Homo sapien
atgatataacaagaacgcgaccaca

SEQ ID NO: 6097042 - DNA, 25 bp, Homo sapien
cggatgtctggtcgtttcttaagat

SEQ ID NO: 6097043 - DNA, 25 bp, Homo sapien
tgtgcgtccgcctcagacaatgtaa

SEQ ID NO: 6097044 - DNA, 25 bp, Homo sapien
ccagaccgcacagacttgtagtcca

SEQ ID NO: 6097045 - DNA, 25 bp, Homo sapien
gtcaagcgcaactgaacacgtgaag

SEQ ID NO: 6097046 - DNA, 25 bp, Homo sapien
tggttgcggggttgacgagtatcta

SEQ ID NO: 6097047 - DNA, 25 bp, Homo sapien
atacgactcgtattttgggctcggg

SEQ ID NO: 6097048 - DNA, 25 bp, Homo sapien
gtcgagtaaacacctcagactggac

SEQ ID NO: 6097049 - DNA, 25 bp, Homo sapien
accatatcgtgcacatgtcgagttt

SEQ ID NO: 6097050 - DNA, 25 bp, Homo sapien
acatcgaggtagcatccgcacccat

SEQ ID NO: 6097051 - DNA, 25 bp, Homo sapien
ccagtccggatgtctggtcgtttct

SEQ ID NO: 6097052 - DNA, 25 bp, Homo sapien
acgcactaggaacagccttcagcat

SEQ ID NO: 6097053 - DNA, 25 bp, Homo sapien
tttgaaaccatatcgtgcacatgtc

SEQ ID NO: 6097054 - DNA, 25 bp, Homo sapien
cacccatcatccgacccggggtcat

SEQ ID NO: 6097055 - DNA, 25 bp, Homo sapien
cggggttgacgagtatctatcaaca

SEQ ID NO: 6097056 - DNA, 25 bp, Homo sapien
aagtgaccaatagtccttgtctagc

SEQ ID NO: 6097057 - DNA, 25 bp, Homo sapien
tccattcgtgcggttgtgttggcgt

SEQ ID NO: 6097058 - DNA, 25 bp, Homo sapien
tgtccctacaatcgccggggtgagc

SEQ ID NO: 6097059 - DNA, 25 bp, Homo sapien
tctagctggttagtcgtcggcggtc

SEQ ID NO: 6097060 - DNA, 25 bp, Homo sapien
tggactgtcgcccccctctatcatt

SEQ ID NO: 6097061 - DNA, 25 bp, Homo sapien
ttcttattcacaggcaccgatcgag

SEQ ID NO: 6097062 - DNA, 25 bp, Homo sapien
tgcctgccttttgacggcctccatt

SEQ ID NO: 6097063 - DNA, 25 bp, Homo sapien
catagaatagtaaaaccctcttgga

SEQ ID NO: 6097064 - DNA, 25 bp, Homo sapien
tgagtgcatagaatagtaaaaccct

SEQ ID NO: 6097065 - DNA, 25 bp, Homo sapien
ttacacttgcctgccttttgacggc

SEQ ID NO: 6097066 - DNA, 25 bp, Homo sapien
tctgatattgtaccccgaaagtgct

SEQ ID NO: 6097067 - DNA, 25 bp, Homo sapien
caaagcagaattgtgtcttataaaa

SEQ ID NO: 6097068 - DNA, 25 bp, Homo sapien
ggagacccgagtaagtgaccaatag

SEQ ID NO: 6097069 - DNA, 25 bp, Homo sapien
cttttgacggcctccattcgtgcgg

SEQ ID NO: 6097070 - DNA, 25 bp, Homo sapien
gtgagcttacacttgcctgcctttt

SEQ ID NO: 6097071 - DNA, 25 bp, Homo sapien
gccggggtgagcttacacttgcctg

SEQ ID NO: 6097072 - DNA, 25 bp, Homo sapien
agtgctgatatacttcccgacccac

SEQ ID NO: 6097073 - DNA, 25 bp, Homo sapien
tgattccctcgaccgcctcataaca

SEQ ID NO: 6097074 - DNA, 25 bp, Homo sapien
tgtacgatctgatggtgaacgaact

SEQ ID NO: 6097075 - DNA, 25 bp, Homo sapien
caatagtccttgtctagctggttag

SEQ ID NO: 6097076 - DNA, 25 bp, Homo sapien
aattgctggactgtcgcccccctct

SEQ ID NO: 6097077 - DNA, 25 bp, Homo sapien
agtcgtcggcggtctgatattgtac

SEQ ID NO: 6097078 - DNA, 25 bp, Homo sapien
gtgaggggcccaggagacccgagta

SEQ ID NO: 6097079 - DNA, 25 bp, Homo sapien
ctcgaccgcctcataacagtgtggc

SEQ ID NO: 6097080 - DNA, 25 bp, Homo sapien
agaattgtgtcttataaaaaagccg

SEQ ID NO: 6097081 - DNA, 25 bp, Homo sapien
cggcggtctgatattgtaccccgaa

SEQ ID NO: 6097082 - DNA, 25 bp, Homo sapien
cctagttgtacgatctgatggtgaa

SEQ ID NO: 6097083 - DNA, 25 bp, Homo sapien
ttcatgacgagtgaagtattgaccg

SEQ ID NO: 6097084 - DNA, 25 bp, Homo sapien
acaatcgccggggtgagcttacact

SEQ ID NO: 6097085 - DNA, 25 bp, Homo sapien
acgaactctgggcaaatgttgttct

SEQ ID NO: 6097086 - DNA, 25 bp, Homo sapien
tcttggaattgctggactgtcgccc

SEQ ID NO: 6097087 - DNA, 25 bp, Homo sapien
tggtgaacgaactctgggcaaatgt

SEQ ID NO: 6097088 - DNA, 25 bp, Homo sapien
ggttgtgttggcgtgattccctcga

SEQ ID NO: 6097089 - DNA, 25 bp, Homo sapien
aaaccctcttggaattgctggactg

SEQ ID NO: 6097090 - DNA, 25 bp, Homo sapien
gtaccgcctagttgtacgatctgat

SEQ ID NO: 6097091 - DNA, 25 bp, Homo sapien
ggcccaggagacccgagtaagtgac

SEQ ID NO: 6097092 - DNA, 25 bp, Homo sapien
cccctctatcattcatgacgagtga

SEQ ID NO: 6097093 - DNA, 25 bp, Homo sapien
cgcctcataacagtgtggctagcag

SEQ ID NO: 6097094 - DNA, 25 bp, Homo sapien
gtgtggctagcagagaaagtgaggg

SEQ ID NO: 6097095 - DNA, 25 bp, Homo sapien
tcgatttcttattcacaggcaccga

SEQ ID NO: 6097096 - DNA, 25 bp, Homo sapien
ctctgggcaaatgttgttctcgtaa

SEQ ID NO: 6097097 - DNA, 25 bp, Homo sapien
gaagtattgaccggacctcaacgaa

SEQ ID NO: 6097098 - DNA, 25 bp, Homo sapien
gtcgcccccctctatcattcatgac

SEQ ID NO: 6097099 - DNA, 25 bp, Homo sapien
atctgatggtgaacgaactctgggc

SEQ ID NO: 6097100 - DNA, 25 bp, Homo sapien
tcgtgcggttgtgttggcgtgattc

SEQ ID NO: 6097101 - DNA, 25 bp, Homo sapien
gcaaatgttgttctcgtaaccgtca

SEQ ID NO: 6097102 - DNA, 25 bp, Homo sapien
acggcctccattcgtgcggttgtgt

SEQ ID NO: 6097103 - DNA, 25 bp, Homo sapien
ctggttagtcgtcggcggtctgata

SEQ ID NO: 6097104 - DNA, 25 bp, Homo sapien
ctagcagagaaagtgaggggcccag

SEQ ID NO: 6097105 - DNA, 25 bp, Homo sapien
ggcaccgatcgagcggtggcgcagg

SEQ ID NO: 6097106 - DNA, 25 bp, Homo sapien
atagtaaaaccctcttggaattgct

SEQ ID NO: 6097107 - DNA, 25 bp, Homo sapien
ctatcattcatgacgagtgaagtat

SEQ ID NO: 6097108 - DNA, 25 bp, Homo sapien
acccaccaaagcagaattgtgtctt

SEQ ID NO: 6097109 - DNA, 25 bp, Homo sapien
cggtggcgcaggtgagtgcatagaa

SEQ ID NO: 6097110 - DNA, 25 bp, Homo sapien
atatacttcccgacccaccaaagca

SEQ ID NO: 6097111 - DNA, 25 bp, Homo sapien
cgcaggtgagtgcatagaatagtaa

SEQ ID NO: 6097112 - DNA, 25 bp, Homo sapien
ttgtaccccgaaagtgctgatatac

SEQ ID NO: 6097113 - DNA, 25 bp, Homo sapien
ttcccgacccaccaaagcagaattg

SEQ ID NO: 6097114 - DNA, 25 bp, Homo sapien
aagccgtaccgcctagttgtacgat

SEQ ID NO: 6097115 - DNA, 25 bp, Homo sapien
gttggcgtgattccctcgaccgcct

SEQ ID NO: 6097116 - DNA, 25 bp, Homo sapien
ccgagtaagtgaccaatagtccttg

SEQ ID NO: 6097117 - DNA, 25 bp, Homo sapien
gagaaagtgaggggcccaggagacc

SEQ ID NO: 6097118 - DNA, 25 bp, Homo sapien
tccttgtctagctggttagtcgtcg

SEQ ID NO: 6097119 - DNA, 25 bp, Homo sapien
ttcacaggcaccgatcgagcggtgg

SEQ ID NO: 6097120 - DNA, 25 bp, Homo sapien
acgagtgaagtattgaccggacctc

SEQ ID NO: 6097121 - DNA, 25 bp, Homo sapien
atcgagcggtggcgcaggtgagtgc

SEQ ID NO: 6097122 - DNA, 25 bp, Homo sapien
cccgaaagtgctgatatacttcccg

SEQ ID NO: 6097123 - DNA, 25 bp, Homo sapien
ataacagtgtggctagcagagaaag

SEQ ID NO: 6097124 - DNA, 25 bp, Homo sapien
gacaggtgtatgctcggcgtacgcc

SEQ ID NO: 6097125 - DNA, 25 bp, Homo sapien
ccagtcaaaactgtgcatgtgcgtc

SEQ ID NO: 6097126 - DNA, 25 bp, Homo sapien
gtttgttgtcgtagcgccattcttc

SEQ ID NO: 6097127 - DNA, 25 bp, Homo sapien
tcacatcagcggactcggtttataa

SEQ ID NO: 6097128 - DNA, 25 bp, Homo sapien
cgaacgacttactgtctctaattaa

SEQ ID NO: 6097129 - DNA, 25 bp, Homo sapien
tgtcgtagcgccattcttcgaacga

SEQ ID NO: 6097130 - DNA, 25 bp, Homo sapien
actacgcatgtgacccatcacggtc

SEQ ID NO: 6097131 - DNA, 25 bp, Homo sapien
ccataccacagtgatcaacacaatt

SEQ ID NO: 6097132 - DNA, 25 bp, Homo sapien
gcacaagtccacgacttcgtttgtt

SEQ ID NO: 6097133 - DNA, 25 bp, Homo sapien
tcaagtaggtggtcacatcagcgga

SEQ ID NO: 6097134 - DNA, 25 bp, Homo sapien
cacaattgagcagcacaagtccacg

SEQ ID NO: 6097135 - DNA, 25 bp, Homo sapien
atttgactcgtccatttggtttagt

SEQ ID NO: 6097136 - DNA, 25 bp, Homo sapien
catttggtttagtgtacaatatctc

SEQ ID NO: 6097137 - DNA, 25 bp, Homo sapien
agcgccattcttcgaacgacttact

SEQ ID NO: 6097138 - DNA, 25 bp, Homo sapien
ttctccgtcctacattagatgaaag

SEQ ID NO: 6097139 - DNA, 25 bp, Homo sapien
gacttcgtttgttgtcgtagcgcca

SEQ ID NO: 6097140 - DNA, 25 bp, Homo sapien
cagcggactcggtttataatcccaa

SEQ ID NO: 6097141 - DNA, 25 bp, Homo sapien
cattagatgaaagcgattcattggg

SEQ ID NO: 6097142 - DNA, 25 bp, Homo sapien
ggttgttcaagtaggtggtcacatc

SEQ ID NO: 6097143 - DNA, 25 bp, Homo sapien
gtccacgacttcgtttgttgtcgta

SEQ ID NO: 6097144 - DNA, 25 bp, Homo sapien
gacctgactacgcatgtgacccatc

SEQ ID NO: 6097145 - DNA, 25 bp, Homo sapien
taattaactgcgagttgcgagagca

SEQ ID NO: 6097146 - DNA, 25 bp, Homo sapien
gtaatttctcttgccctaccttaca

SEQ ID NO: 6097147 - DNA, 25 bp, Homo sapien
actgcgagttgcgagagcatttgac

SEQ ID NO: 6097148 - DNA, 25 bp, Homo sapien
agctcgggccgatcagagctttgca

SEQ ID NO: 6097149 - DNA, 25 bp, Homo sapien
tttgcgagctcgggccgatcagagc

SEQ ID NO: 6097150 - DNA, 25 bp, Homo sapien
cacggtccagtcaaaactgtgcatg

SEQ ID NO: 6097151 - DNA, 25 bp, Homo sapien
ggccgatcagagctttgcattccgt

SEQ ID NO: 6097152 - DNA, 25 bp, Homo sapien
aaaactgtgcatgtgcgtcccaggg

SEQ ID NO: 6097153 - DNA, 25 bp, Homo sapien
tttctcttgccctaccttacaattc

SEQ ID NO: 6097154 - DNA, 25 bp, Homo sapien
ccaagagacaggtgtatgctcggcg

SEQ ID NO: 6097155 - DNA, 25 bp, Homo sapien
gttactcgacacataggcgtgagga

SEQ ID NO: 6097156 - DNA, 25 bp, Homo sapien
aggtggtcacatcagcggactcggt

SEQ ID NO: 6097157 - DNA, 25 bp, Homo sapien
gcgattcattgggttgttcaagtag

SEQ ID NO: 6097158 - DNA, 25 bp, Homo sapien
cataggcgtgaggacgctcctggca

SEQ ID NO: 6097159 - DNA, 25 bp, Homo sapien
ctcgtccatttggtttagtgtacaa

SEQ ID NO: 6097160 - DNA, 25 bp, Homo sapien
tcagagctttgcattccgtcgataa

SEQ ID NO: 6097161 - DNA, 25 bp, Homo sapien
tgtatgctcggcgtacgcctcaaaa

SEQ ID NO: 6097162 - DNA, 25 bp, Homo sapien
atgaaagcgattcattgggttgttc

SEQ ID NO: 6097163 - DNA, 25 bp, Homo sapien
gatcaacacaattgagcagcacaag

SEQ ID NO: 6097164 - DNA, 25 bp, Homo sapien
cacagtgatcaacacaattgagcag

SEQ ID NO: 6097165 - DNA, 25 bp, Homo sapien
agcctaccaagagacaggtgtatgc

SEQ ID NO: 6097166 - DNA, 25 bp, Homo sapien
tcctggcagtgggttcagacctgac

SEQ ID NO: 6097167 - DNA, 25 bp, Homo sapien
taccttacaattctccgtcctacat

SEQ ID NO: 6097168 - DNA, 25 bp, Homo sapien
ctttgcattccgtcgataagcctac

SEQ ID NO: 6097169 - DNA, 25 bp, Homo sapien
tcattgggttgttcaagtaggtggt

SEQ ID NO: 6097170 - DNA, 25 bp, Homo sapien
gtgcatgtgcgtcccagggccatac

SEQ ID NO: 6097171 - DNA, 25 bp, Homo sapien
actatggttactcgacacataggcg

SEQ ID NO: 6097172 - DNA, 25 bp, Homo sapien
tcgataagcctaccaagagacaggt

SEQ ID NO: 6097173 - DNA, 25 bp, Homo sapien
acttactgtctctaattaactgcga

SEQ ID NO: 6097174 - DNA, 25 bp, Homo sapien
cgacacataggcgtgaggacgctcc

SEQ ID NO: 6097175 - DNA, 25 bp, Homo sapien
ttgccctaccttacaattctccgtc

SEQ ID NO: 6097176 - DNA, 25 bp, Homo sapien
gacgctcctggcagtgggttcagac

SEQ ID NO: 6097177 - DNA, 25 bp, Homo sapien
gagagcatttgactcgtccatttgg

SEQ ID NO: 6097178 - DNA, 25 bp, Homo sapien
gtacgcctcaaaactatggttactc

SEQ ID NO: 6097179 - DNA, 25 bp, Homo sapien
acccatcacggtccagtcaaaactg

SEQ ID NO: 6097180 - DNA, 25 bp, Homo sapien
ccagggccataccacagtgatcaac

SEQ ID NO: 6097181 - DNA, 25 bp, Homo sapien
tataatcccaaaaggcgccagcctt

SEQ ID NO: 6097182 - DNA, 25 bp, Homo sapien
aaggcgccagcctttgcgagctcgg

SEQ ID NO: 6097183 - DNA, 25 bp, Homo sapien
ccagcctttgcgagctcgggccgat

SEQ ID NO: 6097184 - DNA, 25 bp, Homo sapien
tgtctctaattaactgcgagttgcg

SEQ ID NO: 6097185 - DNA, 25 bp, Homo sapien
ttacaattctccgtcctacattaga

SEQ ID NO: 6097186 - DNA, 25 bp, Homo sapien
tgcgtcccagggccataccacagtg

SEQ ID NO: 6097187 - DNA, 25 bp, Homo sapien
gtcctacattagatgaaagcgattc

SEQ ID NO: 6097188 - DNA, 25 bp, Homo sapien
attccgtcgataagcctaccaagag

SEQ ID NO: 6097189 - DNA, 25 bp, Homo sapien
ggttcagacctgactacgcatgtga

SEQ ID NO: 6097190 - DNA, 25 bp, Homo sapien
tgagcagcacaagtccacgacttcg

SEQ ID NO: 6097191 - DNA, 25 bp, Homo sapien
agttgcgagagcatttgactcgtcc

SEQ ID NO: 6097192 - DNA, 25 bp, Homo sapien
attcttcgaacgacttactgtctct

SEQ ID NO: 6097193 - DNA, 25 bp, Homo sapien
cgtgaggacgctcctggcagtgggt

SEQ ID NO: 6097194 - DNA, 25 bp, Homo sapien
catgtgacccatcacggtccagtca

SEQ ID NO: 6097195 - DNA, 25 bp, Homo sapien
ctcggcgtacgcctcaaaactatgg

SEQ ID NO: 6097196 - DNA, 25 bp, Homo sapien
ctcaaaactatggttactcgacaca

SEQ ID NO: 6097197 - DNA, 25 bp, Homo sapien
cccaaaaggcgccagcctttgcgag

SEQ ID NO: 6097198 - DNA, 25 bp, Homo sapien
gcagtgggttcagacctgactacgc

SEQ ID NO: 6097199 - DNA, 25 bp, Homo sapien
tgctctcgccactagtttatccact

SEQ ID NO: 6097200 - DNA, 25 bp, Homo sapien
tgaccatctttgctgtgtcacgatt

SEQ ID NO: 6097201 - DNA, 25 bp, Homo sapien
ccgatagctgatagtgccccatgaa

SEQ ID NO: 6097202 - DNA, 25 bp, Homo sapien
agggccagtcacagttcatccttcc

SEQ ID NO: 6097203 - DNA, 25 bp, Homo sapien
aatcaaaggcgccacaattattgca

SEQ ID NO: 6097204 - DNA, 25 bp, Homo sapien
catcaagctcgtacccgaagggcca

SEQ ID NO: 6097205 - DNA, 25 bp, Homo sapien
atttgctccagaactacgttgactg

SEQ ID NO: 6097206 - DNA, 25 bp, Homo sapien
agcaacaatcaaaggcgccacaatt

SEQ ID NO: 6097207 - DNA, 25 bp, Homo sapien
caagtaagaaggtgttacacaacaa

SEQ ID NO: 6097208 - DNA, 25 bp, Homo sapien
ccacaattattgcacatatctgagg

SEQ ID NO: 6097209 - DNA, 25 bp, Homo sapien
gctgatagtgccccatgaagataaa

SEQ ID NO: 6097210 - DNA, 25 bp, Homo sapien
tgggttaatttgctccagaactacg

SEQ ID NO: 6097211 - DNA, 25 bp, Homo sapien
cacgcggtatgaggacaagcctggt

SEQ ID NO: 6097212 - DNA, 25 bp, Homo sapien
cggccctgcatagctaacacttgca

SEQ ID NO: 6097213 - DNA, 25 bp, Homo sapien
cacagtcccattgccttgagaaagc

SEQ ID NO: 6097214 - DNA, 25 bp, Homo sapien
actacgttgactgccgtaaacttgg

SEQ ID NO: 6097215 - DNA, 25 bp, Homo sapien
gaaagctgggttaatttgctccaga

SEQ ID NO: 6097216 - DNA, 25 bp, Homo sapien
agtcacagttcatccttccacgcgg

SEQ ID NO: 6097217 - DNA, 25 bp, Homo sapien
gctaacacttgcaaactccatcaag

SEQ ID NO: 6097218 - DNA, 25 bp, Homo sapien
ttagtttgaccatctttgctgtgtc

SEQ ID NO: 6097219 - DNA, 25 bp, Homo sapien
cagtagcaagtaagaaggtgttaca

SEQ ID NO: 6097220 - DNA, 25 bp, Homo sapien
ctctatagcaacaatcaaaggcgcc

SEQ ID NO: 6097221 - DNA, 25 bp, Homo sapien
gccgtcacaaatcagtagcaagtaa

SEQ ID NO: 6097222 - DNA, 25 bp, Homo sapien
cggagtcggccctgcatagctaaca

SEQ ID NO: 6097223 - DNA, 25 bp, Homo sapien
aaactccatcaagctcgtacccgaa

SEQ ID NO: 6097224 - DNA, 25 bp, Homo sapien
ggtggctacctgctcggtgtcgatc

SEQ ID NO: 6097225 - DNA, 25 bp, Homo sapien
aacgcgtcacacactactagactct

SEQ ID NO: 6097226 - DNA, 25 bp, Homo sapien
gtaagtacaccattagtttgaccat

SEQ ID NO: 6097227 - DNA, 25 bp, Homo sapien
tcggtgtcgatctgtggggggattc

SEQ ID NO: 6097228 - DNA, 25 bp, Homo sapien
cttgggtaagtacaccattagtttg

SEQ ID NO: 6097229 - DNA, 25 bp, Homo sapien
gtacactcctcaggtggctacctgc

SEQ ID NO: 6097230 - DNA, 25 bp, Homo sapien
agaaggtgttacacaacaacgcgtc

SEQ ID NO: 6097231 - DNA, 25 bp, Homo sapien
tctgaggtacactcctcaggtggct

SEQ ID NO: 6097232 - DNA, 25 bp, Homo sapien
tgttacacaacaacgcgtcacacac

SEQ ID NO: 6097233 - DNA, 25 bp, Homo sapien
ccttgagaaagctgggttaatttgc

SEQ ID NO: 6097234 - DNA, 25 bp, Homo sapien
gctcgtacccgaagggccagtcaca

SEQ ID NO: 6097235 - DNA, 25 bp, Homo sapien
tcctcaggtggctacctgctcggtg

SEQ ID NO: 6097236 - DNA, 25 bp, Homo sapien
agataaaaacttttcaccaccacag

SEQ ID NO: 6097237 - DNA, 25 bp, Homo sapien
tacctgctcggtgtcgatctgtggg

SEQ ID NO: 6097238 - DNA, 25 bp, Homo sapien
agtttatccactccgatagctgata

SEQ ID NO: 6097239 - DNA, 25 bp, Homo sapien
tagactctctatagcaacaatcaaa

SEQ ID NO: 6097240 - DNA, 25 bp, Homo sapien
cgatctgtggggggattctgctctc

SEQ ID NO: 6097241 - DNA, 25 bp, Homo sapien
gcctggttcttctcactcctgacta

SEQ ID NO: 6097242 - DNA, 25 bp, Homo sapien
tccactccgatagctgatagtgccc

SEQ ID NO: 6097243 - DNA, 25 bp, Homo sapien
ttgaggccggagtcggccctgcata

SEQ ID NO: 6097244 - DNA, 25 bp, Homo sapien
ctgtgtcacgattgaggccggagtc

SEQ ID NO: 6097245 - DNA, 25 bp, Homo sapien
acaacaacgcgtcacacactactag

SEQ ID NO: 6097246 - DNA, 25 bp, Homo sapien
acttgcaaactccatcaagctcgta

SEQ ID NO: 6097247 - DNA, 25 bp, Homo sapien
acttttcaccaccacagtcccattg

SEQ ID NO: 6097248 - DNA, 25 bp, Homo sapien
acaccattagtttgaccatctttgc

SEQ ID NO: 6097249 - DNA, 25 bp, Homo sapien
caccaccacagtcccattgccttga

SEQ ID NO: 6097250 - DNA, 25 bp, Homo sapien
agttcatccttccacgcggtatgag

SEQ ID NO: 6097251 - DNA, 25 bp, Homo sapien
tccttccacgcggtatgaggacaag

SEQ ID NO: 6097252 - DNA, 25 bp, Homo sapien
agtgccccatgaagataaaaacttt

SEQ ID NO: 6097253 - DNA, 25 bp, Homo sapien
ggattctgctctcgccactagttta

SEQ ID NO: 6097254 - DNA, 25 bp, Homo sapien
tctttgctgtgtcacgattgaggcc

SEQ ID NO: 6097255 - DNA, 25 bp, Homo sapien
gtatgaggacaagcctggttcttct

SEQ ID NO: 6097256 - DNA, 25 bp, Homo sapien
ccatgaagataaaaacttttcacca

SEQ ID NO: 6097257 - DNA, 25 bp, Homo sapien
gtcacacactactagactctctata

SEQ ID NO: 6097258 - DNA, 25 bp, Homo sapien
ttattgcacatatctgaggtacact

SEQ ID NO: 6097259 - DNA, 25 bp, Homo sapien
tgcatagctaacacttgcaaactcc

SEQ ID NO: 6097260 - DNA, 25 bp, Homo sapien
tccagaactacgttgactgccgtaa

SEQ ID NO: 6097261 - DNA, 25 bp, Homo sapien
cacatatctgaggtacactcctcag

SEQ ID NO: 6097262 - DNA, 25 bp, Homo sapien
cactactagactctctatagcaaca

SEQ ID NO: 6097263 - DNA, 25 bp, Homo sapien
aaggcgccacaattattgcacatat

SEQ ID NO: 6097264 - DNA, 25 bp, Homo sapien
gccactagtttatccactccgatag

SEQ ID NO: 6097265 - DNA, 25 bp, Homo sapien
ggacaagcctggttcttctcactcc

SEQ ID NO: 6097266 - DNA, 25 bp, Homo sapien
tcacgattgaggccggagtcggccc

SEQ ID NO: 6097267 - DNA, 25 bp, Homo sapien
gtggggggattctgctctcgccact

SEQ ID NO: 6097268 - DNA, 25 bp, Homo sapien
ccattgccttgagaaagctgggtta

SEQ ID NO: 6097269 - DNA, 25 bp, Homo sapien
acaaatcagtagcaagtaagaaggt

SEQ ID NO: 6097270 - DNA, 25 bp, Homo sapien
acccgaagggccagtcacagttcat

SEQ ID NO: 6097271 - DNA, 25 bp, Homo sapien
tgactgccgtaaacttgggtaagta

SEQ ID NO: 6097272 - DNA, 25 bp, Homo sapien
tctctgagttactgcgtctgtaacg

SEQ ID NO: 6097273 - DNA, 25 bp, Homo sapien
gggtcgtcgtgaccacaagtacaca

SEQ ID NO: 6097274 - DNA, 25 bp, Homo sapien
tcgtgaccacaagtacacatcggtc

SEQ ID NO: 6097275 - DNA, 25 bp, Homo sapien
ctttgaggacggaaggaacagagca

SEQ ID NO: 6097276 - DNA, 25 bp, Homo sapien
gacggaaggaacagagcagcgctcc

SEQ ID NO: 6097277 - DNA, 25 bp, Homo sapien
ggtcactcaacagtgaaatttccac

SEQ ID NO: 6097278 - DNA, 25 bp, Homo sapien
cgaaattcgacgtcctcagtctatc

SEQ ID NO: 6097279 - DNA, 25 bp, Homo sapien
cccgagctgtgccgcgtggatacgc

SEQ ID NO: 6097280 - DNA, 25 bp, Homo sapien
tgtaacgtagtcttagatacgacaa

SEQ ID NO: 6097281 - DNA, 25 bp, Homo sapien
cagaggctaccaggtttcactgaca

SEQ ID NO: 6097282 - DNA, 25 bp, Homo sapien
gtttcccaaaatcagaggctaccag

SEQ ID NO: 6097283 - DNA, 25 bp, Homo sapien
gtgaaatttccaccgggtgatctgc

SEQ ID NO: 6097284 - DNA, 25 bp, Homo sapien
tcggtcggcgaaagtcagcacgaac

SEQ ID NO: 6097285 - DNA, 25 bp, Homo sapien
ccctgtcgttctatcggtctacgtc

SEQ ID NO: 6097286 - DNA, 25 bp, Homo sapien
gttaacagggacgagcgtgtgaggc

SEQ ID NO: 6097287 - DNA, 25 bp, Homo sapien
cttgggtcagtgtttcccaaaatca

SEQ ID NO: 6097288 - DNA, 25 bp, Homo sapien
aagttgttcgatttcacaaccatac

SEQ ID NO: 6097289 - DNA, 25 bp, Homo sapien
ctgtgccgcgtggatacgcttatat

SEQ ID NO: 6097290 - DNA, 25 bp, Homo sapien
tgccatcaatgtagatgtggtcact

SEQ ID NO: 6097291 - DNA, 25 bp, Homo sapien
tgcgtctgtaacgtagtcttagata

SEQ ID NO: 6097292 - DNA, 25 bp, Homo sapien
gagcgtgtgaggctttgaggacgga

SEQ ID NO: 6097293 - DNA, 25 bp, Homo sapien
cacttaaatggagcgagccattgaa

SEQ ID NO: 6097294 - DNA, 25 bp, Homo sapien
ctacgtcacttaaatggagcgagcc

SEQ ID NO: 6097295 - DNA, 25 bp, Homo sapien
atcggtctacgtcacttaaatggag

SEQ ID NO: 6097296 - DNA, 25 bp, Homo sapien
gatacgcttatatcgcaagccactg

SEQ ID NO: 6097297 - DNA, 25 bp, Homo sapien
tcaacagtgaaatttccaccgggtg

SEQ ID NO: 6097298 - DNA, 25 bp, Homo sapien
ggtttcactgacactgagttaacag

SEQ ID NO: 6097299 - DNA, 25 bp, Homo sapien
cacgaacccgagctgtgccgcgtgg

SEQ ID NO: 6097300 - DNA, 25 bp, Homo sapien
gtcagtgtttcccaaaatcagaggc

SEQ ID NO: 6097301 - DNA, 25 bp, Homo sapien
cgcgtggatacgcttatatcgcaag

SEQ ID NO: 6097302 - DNA, 25 bp, Homo sapien
cactgacactgagttaacagggacg

SEQ ID NO: 6097303 - DNA, 25 bp, Homo sapien
agtcagcacgaacccgagctgtgcc

SEQ ID NO: 6097304 - DNA, 25 bp, Homo sapien
tagtaacttgggtcagtgtttccca

SEQ ID NO: 6097305 - DNA, 25 bp, Homo sapien
tcgcaagccactgtttctaactgat

SEQ ID NO: 6097306 - DNA, 25 bp, Homo sapien
ttcgatttcacaaccataccctgtc

SEQ ID NO: 6097307 - DNA, 25 bp, Homo sapien
atgtaagggtcgtcgtgaccacaag

SEQ ID NO: 6097308 - DNA, 25 bp, Homo sapien
gtagtcttagatacgacaatgtaag

SEQ ID NO: 6097309 - DNA, 25 bp, Homo sapien
cgagccattgaatctctgagttact

SEQ ID NO: 6097310 - DNA, 25 bp, Homo sapien
cagagcagcgctccgcggatcgtct

SEQ ID NO: 6097311 - DNA, 25 bp, Homo sapien
accataccctgtcgttctatcggtc

SEQ ID NO: 6097312 - DNA, 25 bp, Homo sapien
atggagcgagccattgaatctctga

SEQ ID NO: 6097313 - DNA, 25 bp, Homo sapien
attgaatctctgagttactgcgtct

SEQ ID NO: 6097314 - DNA, 25 bp, Homo sapien
agatgtggtcactcaacagtgaaat

SEQ ID NO: 6097315 - DNA, 25 bp, Homo sapien
caaaatcagaggctaccaggtttca

SEQ ID NO: 6097316 - DNA, 25 bp, Homo sapien
cgggtgatctgctagtaacttgggt

SEQ ID NO: 6097317 - DNA, 25 bp, Homo sapien
acgacaatgtaagggtcgtcgtgac

SEQ ID NO: 6097318 - DNA, 25 bp, Homo sapien
ggcgaaagtcagcacgaacccgagc

SEQ ID NO: 6097319 - DNA, 25 bp, Homo sapien
ttggagtcatgatgccatcaatgta

SEQ ID NO: 6097320 - DNA, 25 bp, Homo sapien
agttactgcgtctgtaacgtagtct

SEQ ID NO: 6097321 - DNA, 25 bp, Homo sapien
cgttctatcggtctacgtcacttaa

SEQ ID NO: 6097322 - DNA, 25 bp, Homo sapien
ctaccaggtttcactgacactgagt

SEQ ID NO: 6097323 - DNA, 25 bp, Homo sapien
gtacacatcggtcggcgaaagtcag

SEQ ID NO: 6097324 - DNA, 25 bp, Homo sapien
gtctatcgtaggagaaggtaacgct

SEQ ID NO: 6097325 - DNA, 25 bp, Homo sapien
tcctcagtctatcgtaggagaaggt

SEQ ID NO: 6097326 - DNA, 25 bp, Homo sapien
aacgctaagttgttcgatttcacaa

SEQ ID NO: 6097327 - DNA, 25 bp, Homo sapien
cactgagttaacagggacgagcgtg

SEQ ID NO: 6097328 - DNA, 25 bp, Homo sapien
aactgattggagtcatgatgccatc

SEQ ID NO: 6097329 - DNA, 25 bp, Homo sapien
agggacgagcgtgtgaggctttgag

SEQ ID NO: 6097330 - DNA, 25 bp, Homo sapien
ttcacaaccataccctgtcgttcta

SEQ ID NO: 6097331 - DNA, 25 bp, Homo sapien
aaggaacagagcagcgctccgcgga

SEQ ID NO: 6097332 - DNA, 25 bp, Homo sapien
gtgaggctttgaggacggaaggaac

SEQ ID NO: 6097333 - DNA, 25 bp, Homo sapien
gtttctaactgattggagtcatgat

SEQ ID NO: 6097334 - DNA, 25 bp, Homo sapien
atctgctagtaacttgggtcagtgt

SEQ ID NO: 6097335 - DNA, 25 bp, Homo sapien
cgtaggagaaggtaacgctaagttg

SEQ ID NO: 6097336 - DNA, 25 bp, Homo sapien
tcatgatgccatcaatgtagatgtg

SEQ ID NO: 6097337 - DNA, 25 bp, Homo sapien
ttagatacgacaatgtaagggtcgt

SEQ ID NO: 6097338 - DNA, 25 bp, Homo sapien
tcgacgtcctcagtctatcgtagga

SEQ ID NO: 6097339 - DNA, 25 bp, Homo sapien
gcgctccgcggatcgtctctctgga

SEQ ID NO: 6097340 - DNA, 25 bp, Homo sapien
gccactgtttctaactgattggagt

SEQ ID NO: 6097341 - DNA, 25 bp, Homo sapien
caatgtagatgtggtcactcaacag

SEQ ID NO: 6097342 - DNA, 25 bp, Homo sapien
cttatatcgcaagccactgtttcta

SEQ ID NO: 6097343 - DNA, 25 bp, Homo sapien
ccacaagtacacatcggtcggcgaa

SEQ ID NO: 6097344 - DNA, 25 bp, Homo sapien
ttccaccgggtgatctgctagtaac

SEQ ID NO: 6097345 - DNA, 25 bp, Homo sapien
agaaggtaacgctaagttgttcgat

SEQ ID NO: 6097346 - DNA, 25 bp, Homo sapien
agactgtgaccatgctggtctggtg

SEQ ID NO: 6097347 - DNA, 25 bp, Homo sapien
gcaatgagactgtgaccatgctggt

SEQ ID NO: 6097348 - DNA, 25 bp, Homo sapien
gccgtcggctccctagctcccactt

SEQ ID NO: 6097349 - DNA, 25 bp, Homo sapien
ctcggtcagagctaagcgtcttgtt

SEQ ID NO: 6097350 - DNA, 25 bp, Homo sapien
tagcacgtccctctcggtcagagct

SEQ ID NO: 6097351 - DNA, 25 bp, Homo sapien
aaccaaaatctagccgtcgtcgact

SEQ ID NO: 6097352 - DNA, 25 bp, Homo sapien
agcctagtattattaatctagcacg

SEQ ID NO: 6097353 - DNA, 25 bp, Homo sapien
tcttgttatcagacactactccgtt

SEQ ID NO: 6097354 - DNA, 25 bp, Homo sapien
gattattctcctttacctagtactc

SEQ ID NO: 6097355 - DNA, 25 bp, Homo sapien
tgctggtctggtggtgagaccgagc

SEQ ID NO: 6097356 - DNA, 25 bp, Homo sapien
gttcggtctgactccggcttggagt

SEQ ID NO: 6097357 - DNA, 25 bp, Homo sapien
tctaatggcgctgtatcctctatga

SEQ ID NO: 6097358 - DNA, 25 bp, Homo sapien
tgagtcgttatgagtgggggggtca

SEQ ID NO: 6097359 - DNA, 25 bp, Homo sapien
tctgactccggcttggagtcgtacg

SEQ ID NO: 6097360 - DNA, 25 bp, Homo sapien
gtccctctcggtcagagctaagcgt

SEQ ID NO: 6097361 - DNA, 25 bp, Homo sapien
tctcctttacctagtactccgtagc

SEQ ID NO: 6097362 - DNA, 25 bp, Homo sapien
ggcgctgtatcctctatgatggggt

SEQ ID NO: 6097363 - DNA, 25 bp, Homo sapien
cagaatcacgctctgaaagtgtcca

SEQ ID NO: 6097364 - DNA, 25 bp, Homo sapien
agaccgagcctagtattattaatct

SEQ ID NO: 6097365 - DNA, 25 bp, Homo sapien
cgtcagtctcgacaagagtctaatg

SEQ ID NO: 6097366 - DNA, 25 bp, Homo sapien
taagcgtcttgttatcagacactac

SEQ ID NO: 6097367 - DNA, 25 bp, Homo sapien
ctagctcccacttagttgtgacgag

SEQ ID NO: 6097368 - DNA, 25 bp, Homo sapien
tgaccatgctggtctggtggtgaga

SEQ ID NO: 6097369 - DNA, 25 bp, Homo sapien
gagtcgtacggaaccaaaatctagc

SEQ ID NO: 6097370 - DNA, 25 bp, Homo sapien
gtatcctctatgatggggttcggtc

SEQ ID NO: 6097371 - DNA, 25 bp, Homo sapien
tgacgagcaatgagactgtgaccat

SEQ ID NO: 6097372 - DNA, 25 bp, Homo sapien
ctccgtagccgtcggctccctagct

SEQ ID NO: 6097373 - DNA, 25 bp, Homo sapien
aattaatcagaggaaactgcccatt

SEQ ID NO: 6097374 - DNA, 25 bp, Homo sapien
acagttcttctggttggaggacttc

SEQ ID NO: 6097375 - DNA, 25 bp, Homo sapien
aaactgcccattgcttaagattatt

SEQ ID NO: 6097376 - DNA, 25 bp, Homo sapien
catttgtagagcgtcagtctcgaca

SEQ ID NO: 6097377 - DNA, 25 bp, Homo sapien
atagtgcagaatcacgctctgaaag

SEQ ID NO: 6097378 - DNA, 25 bp, Homo sapien
tctatgatggggttcggtctgactc

SEQ ID NO: 6097379 - DNA, 25 bp, Homo sapien
cccattgcttaagattattctcctt

SEQ ID NO: 6097380 - DNA, 25 bp, Homo sapien
gtgtccagatcgcatttgtagagcg

SEQ ID NO: 6097381 - DNA, 25 bp, Homo sapien
gtggtgagaccgagcctagtattat

SEQ ID NO: 6097382 - DNA, 25 bp, Homo sapien
tctgacaattaatcagaggaaactg

SEQ ID NO: 6097383 - DNA, 25 bp, Homo sapien
caagagtctaatggcgctgtatcct

SEQ ID NO: 6097384 - DNA, 25 bp, Homo sapien
tcagaggaaactgcccattgcttaa

SEQ ID NO: 6097385 - DNA, 25 bp, Homo sapien
tcatgtcagttcgtggagtctgaca

SEQ ID NO: 6097386 - DNA, 25 bp, Homo sapien
ggctccctagctcccacttagttgt

SEQ ID NO: 6097387 - DNA, 25 bp, Homo sapien
tatcagacactactccgttggagct

SEQ ID NO: 6097388 - DNA, 25 bp, Homo sapien
gtcgagatagtgcagaatcacgctc

SEQ ID NO: 6097389 - DNA, 25 bp, Homo sapien
tctcgacaagagtctaatggcgctg

SEQ ID NO: 6097390 - DNA, 25 bp, Homo sapien
gccgtcgtcgactcatgtcagttcg

SEQ ID NO: 6097391 - DNA, 25 bp, Homo sapien
aatcgttgtgagtcgttatgagtgg

SEQ ID NO: 6097392 - DNA, 25 bp, Homo sapien
gtagagcgtcagtctcgacaagagt

SEQ ID NO: 6097393 - DNA, 25 bp, Homo sapien
cagttcgtggagtctgacaattaat

SEQ ID NO: 6097394 - DNA, 25 bp, Homo sapien
agtgggggggtcacagttcttctgg

SEQ ID NO: 6097395 - DNA, 25 bp, Homo sapien
gtggagtctgacaattaatcagagg

SEQ ID NO: 6097396 - DNA, 25 bp, Homo sapien
cccacttagttgtgacgagcaatga

SEQ ID NO: 6097397 - DNA, 25 bp, Homo sapien
acactactccgttggagctgaataa

SEQ ID NO: 6097398 - DNA, 25 bp, Homo sapien
gttatgagtgggggggtcacagttc

SEQ ID NO: 6097399 - DNA, 25 bp, Homo sapien
ctagtactccgtagccgtcggctcc

SEQ ID NO: 6097400 - DNA, 25 bp, Homo sapien
ctgaaagtgtccagatcgcatttgt

SEQ ID NO: 6097401 - DNA, 25 bp, Homo sapien
cagagctaagcgtcttgttatcaga

SEQ ID NO: 6097402 - DNA, 25 bp, Homo sapien
tccggcttggagtcgtacggaacca

SEQ ID NO: 6097403 - DNA, 25 bp, Homo sapien
gtattattaatctagcacgtccctc

SEQ ID NO: 6097404 - DNA, 25 bp, Homo sapien
tctggtggtgagaccgagcctagta

SEQ ID NO: 6097405 - DNA, 25 bp, Homo sapien
tggagctgaataaattggtcagcta

SEQ ID NO: 6097406 - DNA, 25 bp, Homo sapien
ttaatctagcacgtccctctcggtc

SEQ ID NO: 6097407 - DNA, 25 bp, Homo sapien
ctccgttggagctgaataaattggt

SEQ ID NO: 6097408 - DNA, 25 bp, Homo sapien
tcagctaatcgttgtgagtcgttat

SEQ ID NO: 6097409 - DNA, 25 bp, Homo sapien
tgaataaattggtcagctaatcgtt

SEQ ID NO: 6097410 - DNA, 25 bp, Homo sapien
aattggtcagctaatcgttgtgagt

SEQ ID NO: 6097411 - DNA, 25 bp, Homo sapien
agatcgcatttgtagagcgtcagtc

SEQ ID NO: 6097412 - DNA, 25 bp, Homo sapien
cacgctctgaaagtgtccagatcgc

SEQ ID NO: 6097413 - DNA, 25 bp, Homo sapien
gtcgactcatgtcagttcgtggagt

SEQ ID NO: 6097414 - DNA, 25 bp, Homo sapien
atggggttcggtctgactccggctt

SEQ ID NO: 6097415 - DNA, 25 bp, Homo sapien
aatctagccgtcgtcgactcatgtc

SEQ ID NO: 6097416 - DNA, 25 bp, Homo sapien
gcttaagattattctcctttaccta

SEQ ID NO: 6097417 - DNA, 25 bp, Homo sapien
tagttgtgacgagcaatgagactgt

SEQ ID NO: 6097418 - DNA, 25 bp, Homo sapien
cttaacaagagcgtgcatggccacg

SEQ ID NO: 6097419 - DNA, 25 bp, Homo sapien
aagaacattggcagatggtttcggg

SEQ ID NO: 6097420 - DNA, 25 bp, Homo sapien
ccggatttaggcagagctggtacgt

SEQ ID NO: 6097421 - DNA, 25 bp, Homo sapien
actaaattcggatctatttcggtca

SEQ ID NO: 6097422 - DNA, 25 bp, Homo sapien
acacccctccacgtagagtgccact

SEQ ID NO: 6097423 - DNA, 25 bp, Homo sapien
atactgttaaccaagaacattggca

SEQ ID NO: 6097424 - DNA, 25 bp, Homo sapien
aggatcgttacagtacaaatcattc

SEQ ID NO: 6097425 - DNA, 25 bp, Homo sapien
agatggtttcgggaaatgtatagtg

SEQ ID NO: 6097426 - DNA, 25 bp, Homo sapien
atcattcaagactcgcagctgcgta

SEQ ID NO: 6097427 - DNA, 25 bp, Homo sapien
cgtagagtgccacttaacaagagcg

SEQ ID NO: 6097428 - DNA, 25 bp, Homo sapien
cagagctggcttaagaggtccaaca

SEQ ID NO: 6097429 - DNA, 25 bp, Homo sapien
ttaaccaagaacattggcagatggt

SEQ ID NO: 6097430 - DNA, 25 bp, Homo sapien
agcgtccttcgcagtggtcacccgg

SEQ ID NO: 6097431 - DNA, 25 bp, Homo sapien
tatagtgagttaaagtaattacggc

SEQ ID NO: 6097432 - DNA, 25 bp, Homo sapien
gagaccacagagctggcttaagagg

SEQ ID NO: 6097433 - DNA, 25 bp, Homo sapien
tcgagggacgatattcggagggtct

SEQ ID NO: 6097434 - DNA, 25 bp, Homo sapien
tcgtgtgaggtagagcaacactaaa

SEQ ID NO: 6097435 - DNA, 25 bp, Homo sapien
attggcagatggtttcgggaaatgt

SEQ ID NO: 6097436 - DNA, 25 bp, Homo sapien
cttcgcagtggtcacccggtcgagg

SEQ ID NO: 6097437 - DNA, 25 bp, Homo sapien
gacgatattcggagggtctggaaaa

SEQ ID NO: 6097438 - DNA, 25 bp, Homo sapien
atgatcaccgtgtgacgcatcactt

SEQ ID NO: 6097439 - DNA, 25 bp, Homo sapien
tccaacatgatcaccgtgtgacgca

SEQ ID NO: 6097440 - DNA, 25 bp, Homo sapien
gtgccacttaacaagagcgtgcatg

SEQ ID NO: 6097441 - DNA, 25 bp, Homo sapien
agaggcacacccctccacgtagagt

SEQ ID NO: 6097442 - DNA, 25 bp, Homo sapien
agtctgggtgggaggatcgttacag

SEQ ID NO: 6097443 - DNA, 25 bp, Homo sapien
tcacccggtcgagggacgatattcg

SEQ ID NO: 6097444 - DNA, 25 bp, Homo sapien
acggtcactagacttggggacggca

SEQ ID NO: 6097445 - DNA, 25 bp, Homo sapien
ctggtacgtttgtgacacatactgt

SEQ ID NO: 6097446 - DNA, 25 bp, Homo sapien
atttaggcagagctggtacgtttgt

SEQ ID NO: 6097447 - DNA, 25 bp, Homo sapien
acttggccggatttaggcagagctg

SEQ ID NO: 6097448 - DNA, 25 bp, Homo sapien
tctatttcggtcaggttagaggcac

SEQ ID NO: 6097449 - DNA, 25 bp, Homo sapien
cctccacgtagagtgccacttaaca

SEQ ID NO: 6097450 - DNA, 25 bp, Homo sapien
tggcttaagaggtccaacatgatca

SEQ ID NO: 6097451 - DNA, 25 bp, Homo sapien
tggaaaacagttaacggtcactaga

SEQ ID NO: 6097452 - DNA, 25 bp, Homo sapien
acatgaggtgctaaagcgacttggc

SEQ ID NO: 6097453 - DNA, 25 bp, Homo sapien
tgcatggccacgatatgccgccttg

SEQ ID NO: 6097454 - DNA, 25 bp, Homo sapien
tcacaagagtctgggtgggaggatc

SEQ ID NO: 6097455 - DNA, 25 bp, Homo sapien
tgacacatactgttaaccaagaaca

SEQ ID NO: 6097456 - DNA, 25 bp, Homo sapien
gcagagctggtacgtttgtgacaca

SEQ ID NO: 6097457 - DNA, 25 bp, Homo sapien
gagcaacactaaattcggatctatt

SEQ ID NO: 6097458 - DNA, 25 bp, Homo sapien
tgcagcgagaccacagagctggctt

SEQ ID NO: 6097459 - DNA, 25 bp, Homo sapien
gccacgatatgccgccttgcagcga

SEQ ID NO: 6097460 - DNA, 25 bp, Homo sapien
ctgcgtagcgtccttcgcagtggtc

SEQ ID NO: 6097461 - DNA, 25 bp, Homo sapien
cggctcacatgaggtgctaaagcga

SEQ ID NO: 6097462 - DNA, 25 bp, Homo sapien
aagagcgtgcatggccacgatatgc

SEQ ID NO: 6097463 - DNA, 25 bp, Homo sapien
accgtgtgacgcatcacttcacaag

SEQ ID NO: 6097464 - DNA, 25 bp, Homo sapien
cgccttgcagcgagaccacagagct

SEQ ID NO: 6097465 - DNA, 25 bp, Homo sapien
gtacaaatcattcaagactcgcagc

SEQ ID NO: 6097466 - DNA, 25 bp, Homo sapien
actagacttggggacggcacggctc

SEQ ID NO: 6097467 - DNA, 25 bp, Homo sapien
ggtgctaaagcgacttggccggatt

SEQ ID NO: 6097468 - DNA, 25 bp, Homo sapien
cttggggacggcacggctcacatga

SEQ ID NO: 6097469 - DNA, 25 bp, Homo sapien
tcgcagctgcgtagcgtccttcgca

SEQ ID NO: 6097470 - DNA, 25 bp, Homo sapien
atcacttcacaagagtctgggtggg

SEQ ID NO: 6097471 - DNA, 25 bp, Homo sapien
ggtgggaggatcgttacagtacaaa

SEQ ID NO: 6097472 - DNA, 25 bp, Homo sapien
tttcgggaaatgtatagtgagttaa

SEQ ID NO: 6097473 - DNA, 25 bp, Homo sapien
tgacgcatcacttcacaagagtctg

SEQ ID NO: 6097474 - DNA, 25 bp, Homo sapien
aggttagaggcacacccctccacgt

SEQ ID NO: 6097475 - DNA, 25 bp, Homo sapien
aaagcgacttggccggatttaggca

SEQ ID NO: 6097476 - DNA, 25 bp, Homo sapien
tcggtcaggttagaggcacacccct

SEQ ID NO: 6097477 - DNA, 25 bp, Homo sapien
atattcggagggtctggaaaacagt

SEQ ID NO: 6097478 - DNA, 25 bp, Homo sapien
agtggtcacccggtcgagggacgat

SEQ ID NO: 6097479 - DNA, 25 bp, Homo sapien
acggcacggctcacatgaggtgcta

SEQ ID NO: 6097480 - DNA, 25 bp, Homo sapien
cgtttgtgacacatactgttaacca

SEQ ID NO: 6097481 - DNA, 25 bp, Homo sapien
ttcggatctatttcggtcaggttag

SEQ ID NO: 6097482 - DNA, 25 bp, Homo sapien
aagaggtccaacatgatcaccgtgt

SEQ ID NO: 6097483 - DNA, 25 bp, Homo sapien
acagttaacggtcactagacttggg

SEQ ID NO: 6097484 - DNA, 25 bp, Homo sapien
caagactcgcagctgcgtagcgtcc

SEQ ID NO: 6097485 - DNA, 25 bp, Homo sapien
atatgccgccttgcagcgagaccac

SEQ ID NO: 6097486 - DNA, 25 bp, Homo sapien
gaggtagagcaacactaaattcgga

SEQ ID NO: 6097487 - DNA, 25 bp, Homo sapien
gaaatgtatagtgagttaaagtaat

SEQ ID NO: 6097488 - DNA, 25 bp, Homo sapien
tggccatcgtgtgaggtagagcaac

SEQ ID NO: 6097489 - DNA, 25 bp, Homo sapien
gttacagtacaaatcattcaagact

SEQ ID NO: 6097490 - DNA, 20 bp, Homo sapien
taatcgacttgcggagcgtt

SEQ ID NO: 6097491 - DNA, 20 bp, Homo sapien
aacgctccgcaagtcgatta

SEQ ID NO: 6097492 - DNA, 20 bp, Homo sapien
taatagagttgcctcctcgt

SEQ ID NO: 6097493 - DNA, 20 bp, Homo sapien
acgaggaggcaactctatta

SEQ ID NO: 6097494 - DNA, 20 bp, Homo sapien
taagccgctgttgcgtaaat

SEQ ID NO: 6097495 - DNA, 20 bp, Homo sapien
atttacgcaacagcggctta

SEQ ID NO: 6097496 - DNA, 20 bp, Homo sapien
gtgcccacttctcggtatgt

SEQ ID NO: 6097497 - DNA, 20 bp, Homo sapien
acataccgagaagtgggcac

SEQ ID NO: 6097498 - DNA, 20 bp, Homo sapien
gtgagaacttcgattcgtgt

SEQ ID NO: 6097499 - DNA, 20 bp, Homo sapien
acacgaatcgaagttctcac

SEQ ID NO: 6097500 - DNA, 20 bp, Homo sapien
gtcgggacttctgacgctat

SEQ ID NO: 6097501 - DNA, 20 bp, Homo sapien
atagcgtcagaagtcccgac

SEQ ID NO: 6097502 - DNA, 20 bp, Homo sapien
gtcgaggattctgaacctgt

SEQ ID NO: 6097503 - DNA, 20 bp, Homo sapien
acaggttcagaatcctcgac

SEQ ID NO: 6097504 - DNA, 20 bp, Homo sapien
gtaggcgattctagccaatt

SEQ ID NO: 6097505 - DNA, 20 bp, Homo sapien
aattggctagaatcgcctac

SEQ ID NO: 6097506 - DNA, 20 bp, Homo sapien
gtaggcccttctcatcgtgt

SEQ ID NO: 6097507 - DNA, 20 bp, Homo sapien
acacgatgagaagggcctac

SEQ ID NO: 6097508 - DNA, 20 bp, Homo sapien
gtacggccttctacgcatgt

SEQ ID NO: 6097509 - DNA, 20 bp, Homo sapien
acatgcgtagaaggccgtac

SEQ ID NO: 6097510 - DNA, 20 bp, Homo sapien
gccatgcgtgctgtcagtat

SEQ ID NO: 6097511 - DNA, 20 bp, Homo sapien
atactgacagcacgcatggc

SEQ ID NO: 6097512 - DNA, 20 bp, Homo sapien
gtaagcagttcgtgaagtct

SEQ ID NO: 6097513 - DNA, 20 bp, Homo sapien
agacttcacgaactgcttac

SEQ ID NO: 6097514 - DNA, 20 bp, Homo sapien
ggtccgcttgactagcattt

SEQ ID NO: 6097515 - DNA, 20 bp, Homo sapien
aaatgctagtcaagcggacc

SEQ ID NO: 6097516 - DNA, 20 bp, Homo sapien
ggtacgcctggttcagctat

SEQ ID NO: 6097517 - DNA, 20 bp, Homo sapien
atagctgaaccaggcgtacc

SEQ ID NO: 6097518 - DNA, 20 bp, Homo sapien
ggcgtcgttcgatagctctt

SEQ ID NO: 6097519 - DNA, 20 bp, Homo sapien
aagagctatcgaacgacgcc

SEQ ID NO: 6097520 - DNA, 20 bp, Homo sapien
ggcggctattgacgaactct

SEQ ID NO: 6097521 - DNA, 20 bp, Homo sapien
agagttcgtcaatagccgcc

SEQ ID NO: 6097522 - DNA, 20 bp, Homo sapien
ggcacgggttcgatcactat

SEQ ID NO: 6097523 - DNA, 20 bp, Homo sapien
atagtgatcgaacccgtgcc

SEQ ID NO: 6097524 - DNA, 20 bp, Homo sapien
ggagcggcttcgcacaaatt

SEQ ID NO: 6097525 - DNA, 20 bp, Homo sapien
aatttgtgcgaagccgctcc

SEQ ID NO: 6097526 - DNA, 20 bp, Homo sapien
ggaccatgttagtcatcgtt

SEQ ID NO: 6097527 - DNA, 20 bp, Homo sapien
aacgatgactaacatggtcc

SEQ ID NO: 6097528 - DNA, 20 bp, Homo sapien
gctctgcgttccctaaatgt

SEQ ID NO: 6097529 - DNA, 20 bp, Homo sapien
acatttagggaacgcagagc

SEQ ID NO: 6097530 - DNA, 20 bp, Homo sapien
gctcggaattactgcgtgtt

SEQ ID NO: 6097531 - DNA, 20 bp, Homo sapien
aacacgcagtaattccgagc

SEQ ID NO: 6097532 - DNA, 20 bp, Homo sapien
gatactgcttcactctcatg

SEQ ID NO: 6097533 - DNA, 20 bp, Homo sapien
catgagagtgaagcagtatc

SEQ ID NO: 6097534 - DNA, 20 bp, Homo sapien
gctaacagttccgtcactat

SEQ ID NO: 6097535 - DNA, 20 bp, Homo sapien
atagtgacggaactgttagc

SEQ ID NO: 6097536 - DNA, 20 bp, Homo sapien
gcgggcggttcactacatat

SEQ ID NO: 6097537 - DNA, 20 bp, Homo sapien
atatgtagtgaaccgcccgc

SEQ ID NO: 6097538 - DNA, 20 bp, Homo sapien
gcggcgcgttcgacataatt

SEQ ID NO: 6097539 - DNA, 20 bp, Homo sapien
aattatgtcgaacgcgccgc

SEQ ID NO: 6097540 - DNA, 20 bp, Homo sapien
gcggcgagttccgatactat

SEQ ID NO: 6097541 - DNA, 20 bp, Homo sapien
atagtatcggaactcgccgc

SEQ ID NO: 6097542 - DNA, 20 bp, Homo sapien
gcgaggacttcccatcaatt

SEQ ID NO: 6097543 - DNA, 20 bp, Homo sapien
aattgatgggaagtcctcgc

SEQ ID NO: 6097544 - DNA, 20 bp, Homo sapien
gcgacattcctacgacttat

SEQ ID NO: 6097545 - DNA, 20 bp, Homo sapien
ataagtcgtaggaatgtcgc

SEQ ID NO: 6097546 - DNA, 20 bp, Homo sapien
gcctatgcttccgatacgtt

SEQ ID NO: 6097547 - DNA, 20 bp, Homo sapien
aacgtatcggaagcataggc

SEQ ID NO: 6097548 - DNA, 20 bp, Homo sapien
gccgtcggttcaggtcatat

SEQ ID NO: 6097549 - DNA, 20 bp, Homo sapien
atatgacctgaaccgacggc

SEQ ID NO: 6097550 - DNA, 20 bp, Homo sapien
gccgtagcttccgcaagtat

SEQ ID NO: 6097551 - DNA, 20 bp, Homo sapien
atacttgcggaagctacggc

SEQ ID NO: 6097552 - DNA, 20 bp, Homo sapien
gccgtaagttccatcgctgt

SEQ ID NO: 6097553 - DNA, 20 bp, Homo sapien
acagcgatggaacttacggc

SEQ ID NO: 6097554 - DNA, 20 bp, Homo sapien
gatactctggtggagctata

SEQ ID NO: 6097555 - DNA, 20 bp, Homo sapien
tatagctccaccagagtatc

SEQ ID NO: 6097556 - DNA, 20 bp, Homo sapien
gccggaccttcagtgagtat

SEQ ID NO: 6097557 - DNA, 20 bp, Homo sapien
atactcactgaaggtccggc

SEQ ID NO: 6097558 - DNA, 20 bp, Homo sapien
gccgccaattcaagattagt

SEQ ID NO: 6097559 - DNA, 20 bp, Homo sapien
actaatcttgaattggcggc

SEQ ID NO: 6097560 - DNA, 20 bp, Homo sapien
gccgcatgttacggtatctt

SEQ ID NO: 6097561 - DNA, 20 bp, Homo sapien
aagataccgtaacatgcggc

SEQ ID NO: 6097562 - DNA, 20 bp, Homo sapien
gccgatccttcagtcgtatt

SEQ ID NO: 6097563 - DNA, 20 bp, Homo sapien
aatacgactgaaggatcggc

SEQ ID NO: 6097564 - DNA, 20 bp, Homo sapien
gcatgggcttacgtcgtctt

SEQ ID NO: 6097565 - DNA, 20 bp, Homo sapien
aagacgacgtaagcccatgc

SEQ ID NO: 6097566 - DNA, 20 bp, Homo sapien
gcatacagttcccggactat

SEQ ID NO: 6097567 - DNA, 20 bp, Homo sapien
atagtccgggaactgtatgc

SEQ ID NO: 6097568 - DNA, 20 bp, Homo sapien
gcactagcttccgacgtgtt

SEQ ID NO: 6097569 - DNA, 20 bp, Homo sapien
aacacgtcggaagctagtgc

SEQ ID NO: 6097570 - DNA, 20 bp, Homo sapien
gcaacggttacgtgctcgat

SEQ ID NO: 6097571 - DNA, 20 bp, Homo sapien
atcgagcacgtaaccgttgc

SEQ ID NO: 6097572 - DNA, 20 bp, Homo sapien
gagtcaggttcaccgagtct

SEQ ID NO: 6097573 - DNA, 20 bp, Homo sapien
agactcggtgaacctgactc

SEQ ID NO: 6097574 - DNA, 20 bp, Homo sapien
gagtagccttcccgagcatt

SEQ ID NO: 6097575 - DNA, 20 bp, Homo sapien
aatgctcgggaaggctactc

SEQ ID NO: 6097576 - DNA, 20 bp, Homo sapien
gacgcagctcttagcgcaat

SEQ ID NO: 6097577 - DNA, 20 bp, Homo sapien
attgcgctaagagctgcgtc

SEQ ID NO: 6097578 - DNA, 20 bp, Homo sapien
gaggtcgcttcactactctt

SEQ ID NO: 6097579 - DNA, 20 bp, Homo sapien
aagagtagtgaagcgacctc

SEQ ID NO: 6097580 - DNA, 20 bp, Homo sapien
gaggcggattcaccgtcatt

SEQ ID NO: 6097581 - DNA, 20 bp, Homo sapien
aatgacggtgaatccgcctc

SEQ ID NO: 6097582 - DNA, 20 bp, Homo sapien
gagagtcctggtcgtactat

SEQ ID NO: 6097583 - DNA, 20 bp, Homo sapien
atagtacgaccaggactctc

SEQ ID NO: 6097584 - DNA, 20 bp, Homo sapien
gacgctcgttagtcggctat

SEQ ID NO: 6097585 - DNA, 20 bp, Homo sapien
atagccgactaacgagcgtc

SEQ ID NO: 6097586 - DNA, 20 bp, Homo sapien
gacgaacgtgctactcgctt

SEQ ID NO: 6097587 - DNA, 20 bp, Homo sapien
aagcgagtagcacgttcgtc

SEQ ID NO: 6097588 - DNA, 20 bp, Homo sapien
gaccgacgttatcgcgctat

SEQ ID NO: 6097589 - DNA, 20 bp, Homo sapien
atagcgcgataacgtcggtc

SEQ ID NO: 6097590 - DNA, 20 bp, Homo sapien
gaatgcggttcaacagtctt

SEQ ID NO: 6097591 - DNA, 20 bp, Homo sapien
aagactgttgaaccgcattc

SEQ ID NO: 6097592 - DNA, 20 bp, Homo sapien
ctggccgcttagctcgtatt

SEQ ID NO: 6097593 - DNA, 20 bp, Homo sapien
aatacgagctaagcggccag

SEQ ID NO: 6097594 - DNA, 20 bp, Homo sapien
ctgcggattactgcgacttt

SEQ ID NO: 6097595 - DNA, 20 bp, Homo sapien
aaagtcgcagtaatccgcag

SEQ ID NO: 6097596 - DNA, 20 bp, Homo sapien
ctgcaaagttacgtcgcatt

SEQ ID NO: 6097597 - DNA, 20 bp, Homo sapien
aatgcgacgtaactttgcag

SEQ ID NO: 6097598 - DNA, 20 bp, Homo sapien
gacgatccttatactcgatg

SEQ ID NO: 6097599 - DNA, 20 bp, Homo sapien
catcgagtataaggatcgtc

SEQ ID NO: 6097600 - DNA, 20 bp, Homo sapien
ctctctggtacgtcggctat

SEQ ID NO: 6097601 - DNA, 20 bp, Homo sapien
atagccgacgtaccagagag

SEQ ID NO: 6097602 - DNA, 20 bp, Homo sapien
ctctcacgttacggctgatt

SEQ ID NO: 6097603 - DNA, 20 bp, Homo sapien
aatcagccgtaacgtgagag

SEQ ID NO: 6097604 - DNA, 20 bp, Homo sapien
ctcgtacctggtgccgatat

SEQ ID NO: 6097605 - DNA, 20 bp, Homo sapien
atatcggcaccaggtacgag

SEQ ID NO: 6097606 - DNA, 20 bp, Homo sapien
ctcggcggttacagtgatct

SEQ ID NO: 6097607 - DNA, 20 bp, Homo sapien
agatcactgtaaccgccgag

SEQ ID NO: 6097608 - DNA, 20 bp, Homo sapien
ctcgacgcttagccataatt

SEQ ID NO: 6097609 - DNA, 20 bp, Homo sapien
aattatggctaagcgtcgag

SEQ ID NO: 6097610 - DNA, 20 bp, Homo sapien
ctcctacgttagcatcagtt

SEQ ID NO: 6097611 - DNA, 20 bp, Homo sapien
aactgatgctaacgtaggag

SEQ ID NO: 6097612 - DNA, 20 bp, Homo sapien
ctcatcgcttacgagtcggt

SEQ ID NO: 6097613 - DNA, 20 bp, Homo sapien
accgactcgtaagcgatgag

SEQ ID NO: 6097614 - DNA, 20 bp, Homo sapien
ctcagtcgttagcgtcgatt

SEQ ID NO: 6097615 - DNA, 20 bp, Homo sapien
aatcgacgctaacgactgag

SEQ ID NO: 6097616 - DNA, 20 bp, Homo sapien
ctagcacgttactccaatgt

SEQ ID NO: 6097617 - DNA, 20 bp, Homo sapien
acattggagtaacgtgctag

SEQ ID NO: 6097618 - DNA, 20 bp, Homo sapien
ctacctatgtccactagagt

SEQ ID NO: 6097619 - DNA, 20 bp, Homo sapien
actctagtggacataggtag

SEQ ID NO: 6097620 - DNA, 20 bp, Homo sapien
ctgtatctggtatggtgcaa

SEQ ID NO: 6097621 - DNA, 20 bp, Homo sapien
ttgcaccataccagatacag

SEQ ID NO: 6097622 - DNA, 20 bp, Homo sapien
ctaagcctgtcgtgccgtat

SEQ ID NO: 6097623 - DNA, 20 bp, Homo sapien
atacggcacgacaggcttag

SEQ ID NO: 6097624 - DNA, 20 bp, Homo sapien
ctaagccattacgcgacatt

SEQ ID NO: 6097625 - DNA, 20 bp, Homo sapien
aatgtcgcgtaatggcttag

SEQ ID NO: 6097626 - DNA, 20 bp, Homo sapien
cgttactgaagctgaggtct

SEQ ID NO: 6097627 - DNA, 20 bp, Homo sapien
agacctcagcttcagtaacg

SEQ ID NO: 6097628 - DNA, 20 bp, Homo sapien
cgtgccggttaatgagctat

SEQ ID NO: 6097629 - DNA, 20 bp, Homo sapien
atagctcattaaccggcacg

SEQ ID NO: 6097630 - DNA, 20 bp, Homo sapien
cgtcacgttacctacatgat

SEQ ID NO: 6097631 - DNA, 20 bp, Homo sapien
atcatgtaggtaacgtgacg

SEQ ID NO: 6097632 - DNA, 20 bp, Homo sapien
cgtactaatcgtatctgcct

SEQ ID NO: 6097633 - DNA, 20 bp, Homo sapien
aggcagatacgattagtacg

SEQ ID NO: 6097634 - DNA, 20 bp, Homo sapien
cgtaccaatggatgcggtct

SEQ ID NO: 6097635 - DNA, 20 bp, Homo sapien
agaccgcatccattggtacg

SEQ ID NO: 6097636 - DNA, 20 bp, Homo sapien
cgtaatcttccagacctgat

SEQ ID NO: 6097637 - DNA, 20 bp, Homo sapien
atcaggtctggaagattacg

SEQ ID NO: 6097638 - DNA, 20 bp, Homo sapien
cgggcagattactcacctgt

SEQ ID NO: 6097639 - DNA, 20 bp, Homo sapien
acaggtgagtaatctgcccg

SEQ ID NO: 6097640 - DNA, 20 bp, Homo sapien
cggcgcacttatacttctat

SEQ ID NO: 6097641 - DNA, 20 bp, Homo sapien
atagaagtataagtgcgccg

SEQ ID NO: 6097642 - DNA, 20 bp, Homo sapien
ctgtatcatctgtagagtgc

SEQ ID NO: 6097643 - DNA, 20 bp, Homo sapien
gcactctacagatgatacag

SEQ ID NO: 6097644 - DNA, 20 bp, Homo sapien
cggatcgagtagtctgcctt

SEQ ID NO: 6097645 - DNA, 20 bp, Homo sapien
aaggcagactactcgatccg

SEQ ID NO: 6097646 - DNA, 20 bp, Homo sapien
cggacgcggtagtcatctat

SEQ ID NO: 6097647 - DNA, 20 bp, Homo sapien
atagatgactaccgcgtccg

SEQ ID NO: 6097648 - DNA, 20 bp, Homo sapien
cgctgacctgtctaacgtat

SEQ ID NO: 6097649 - DNA, 20 bp, Homo sapien
atacgttagacaggtcagcg

SEQ ID NO: 6097650 - DNA, 20 bp, Homo sapien
cgcgatacttacagtcgatt

SEQ ID NO: 6097651 - DNA, 20 bp, Homo sapien
aatcgactgtaagtatcgcg

SEQ ID NO: 6097652 - DNA, 20 bp, Homo sapien
cgcgagacttagacactctt

SEQ ID NO: 6097653 - DNA, 20 bp, Homo sapien
aagagtgtctaagtctcgcg

SEQ ID NO: 6097654 - DNA, 20 bp, Homo sapien
cgccgctcttagaaggctat

SEQ ID NO: 6097655 - DNA, 20 bp, Homo sapien
atagccttctaagagcggcg

SEQ ID NO: 6097656 - DNA, 20 bp, Homo sapien
cgcccagcttagagcgaatt

SEQ ID NO: 6097657 - DNA, 20 bp, Homo sapien
aattcgctctaagctgggcg

SEQ ID NO: 6097658 - DNA, 20 bp, Homo sapien
cgcacgcctctggagtaaat

SEQ ID NO: 6097659 - DNA, 20 bp, Homo sapien
atttactccagaggcgtgcg

SEQ ID NO: 6097660 - DNA, 20 bp, Homo sapien
cgatccgattacaggccgat

SEQ ID NO: 6097661 - DNA, 20 bp, Homo sapien
atcggcctgtaatcggatcg

SEQ ID NO: 6097662 - DNA, 20 bp, Homo sapien
cgaggccgtcagtgctaatt

SEQ ID NO: 6097663 - DNA, 20 bp, Homo sapien
aattagcactgacggcctcg

SEQ ID NO: 6097664 - DNA, 20 bp, Homo sapien
ctgtatatcgaggtgagtct

SEQ ID NO: 6097665 - DNA, 20 bp, Homo sapien
agactcacctcgatatacag

SEQ ID NO: 6097666 - DNA, 20 bp, Homo sapien
cgagcgcgtaatcgtatatt

SEQ ID NO: 6097667 - DNA, 20 bp, Homo sapien
aatatacgattacgcgctcg

SEQ ID NO: 6097668 - DNA, 20 bp, Homo sapien
cgactattacgactcctgat

SEQ ID NO: 6097669 - DNA, 20 bp, Homo sapien
atcaggagtcgtaatagtcg

SEQ ID NO: 6097670 - DNA, 20 bp, Homo sapien
cgacctagtgctccgagtat

SEQ ID NO: 6097671 - DNA, 20 bp, Homo sapien
atactcggagcactaggtcg

SEQ ID NO: 6097672 - DNA, 20 bp, Homo sapien
ccttatccacctgagtgagt

SEQ ID NO: 6097673 - DNA, 20 bp, Homo sapien
actcactcaggtggataagg

SEQ ID NO: 6097674 - DNA, 20 bp, Homo sapien
cctgaccgtgtagggcatat

SEQ ID NO: 6097675 - DNA, 20 bp, Homo sapien
atatgccctacacggtcagg

SEQ ID NO: 6097676 - DNA, 20 bp, Homo sapien
cctccgactgagtatgcgtt

SEQ ID NO: 6097677 - DNA, 20 bp, Homo sapien
aacgcatactcagtcggagg

SEQ ID NO: 6097678 - DNA, 20 bp, Homo sapien
cctagcctggtaagagtgat

SEQ ID NO: 6097679 - DNA, 20 bp, Homo sapien
atcactcttaccaggctagg

SEQ ID NO: 6097680 - DNA, 20 bp, Homo sapien
cctaccgctgtacgagtgat

SEQ ID NO: 6097681 - DNA, 20 bp, Homo sapien
atcactcgtacagcggtagg

SEQ ID NO: 6097682 - DNA, 20 bp, Homo sapien
cctacattaccatcgaggat

SEQ ID NO: 6097683 - DNA, 20 bp, Homo sapien
atcctcgatggtaatgtagg

SEQ ID NO: 6097684 - DNA, 20 bp, Homo sapien
cccgctactgatatagactt

SEQ ID NO: 6097685 - DNA, 20 bp, Homo sapien
aagtctatatcagtagcggg

SEQ ID NO: 6097686 - DNA, 20 bp, Homo sapien
cggcactctggtgacatgat

SEQ ID NO: 6097687 - DNA, 20 bp, Homo sapien
atcatgtcaccagagtgccg

SEQ ID NO: 6097688 - DNA, 20 bp, Homo sapien
ccatcggattacacacgagt

SEQ ID NO: 6097689 - DNA, 20 bp, Homo sapien
actcgtgtgtaatccgatgg

SEQ ID NO: 6097690 - DNA, 20 bp, Homo sapien
ccagggtatgctcaccgtat

SEQ ID NO: 6097691 - DNA, 20 bp, Homo sapien
atacggtgagcataccctgg

SEQ ID NO: 6097692 - DNA, 20 bp, Homo sapien
catgcgtataaatcggtcgt

SEQ ID NO: 6097693 - DNA, 20 bp, Homo sapien
acgaccgatttatacgcatg

SEQ ID NO: 6097694 - DNA, 20 bp, Homo sapien
cagtcgtggtcggcactaat

SEQ ID NO: 6097695 - DNA, 20 bp, Homo sapien
attagtgccgaccacgactg

SEQ ID NO: 6097696 - DNA, 20 bp, Homo sapien
cagtcgcgtgaggaccaaat

SEQ ID NO: 6097697 - DNA, 20 bp, Homo sapien
atttggtcctcacgcgactg

SEQ ID NO: 6097698 - DNA, 20 bp, Homo sapien
caccacactggagcggtaat

SEQ ID NO: 6097699 - DNA, 20 bp, Homo sapien
attaccgctccagtgtggtg

SEQ ID NO: 6097700 - DNA, 20 bp, Homo sapien
cacacccatgatacggtagt

SEQ ID NO: 6097701 - DNA, 20 bp, Homo sapien
actaccgtatcatgggtgtg

SEQ ID NO: 6097702 - DNA, 20 bp, Homo sapien
caacacgtcctaatagctgt

SEQ ID NO: 6097703 - DNA, 20 bp, Homo sapien
acagctattaggacgtgttg

SEQ ID NO: 6097704 - DNA, 20 bp, Homo sapien
caaagtgcgatacgctcggt

SEQ ID NO: 6097705 - DNA, 20 bp, Homo sapien
accgagcgtatcgcactttg

SEQ ID NO: 6097706 - DNA, 20 bp, Homo sapien
attcggcggtgcctcacaat

SEQ ID NO: 6097707 - DNA, 20 bp, Homo sapien
attgtgaggcaccgccgaat

SEQ ID NO: 6097708 - DNA, 20 bp, Homo sapien
ccaacgatgctactgagtca

SEQ ID NO: 6097709 - DNA, 20 bp, Homo sapien
tgactcagtagcatcgttgg

SEQ ID NO: 6097710 - DNA, 20 bp, Homo sapien
tctaccgctttaggcatatc

SEQ ID NO: 6097711 - DNA, 20 bp, Homo sapien
gatatgcctaaagcggtaga

SEQ ID NO: 6097712 - DNA, 20 bp, Homo sapien
attcgcgcacctgaggattt

SEQ ID NO: 6097713 - DNA, 20 bp, Homo sapien
aaatcctcaggtgcgcgaat

SEQ ID NO: 6097714 - DNA, 20 bp, Homo sapien
attcagccacctcgtatagt

SEQ ID NO: 6097715 - DNA, 20 bp, Homo sapien
actatacgaggtggctgaat

SEQ ID NO: 6097716 - DNA, 20 bp, Homo sapien
atgtgtccgaacgtcgagct

SEQ ID NO: 6097717 - DNA, 20 bp, Homo sapien
agctcgacgttcggacacat

SEQ ID NO: 6097718 - DNA, 20 bp, Homo sapien
atgccaggtcgtagtcgaat

SEQ ID NO: 6097719 - DNA, 20 bp, Homo sapien
attcgactacgacctggcat

SEQ ID NO: 6097720 - DNA, 20 bp, Homo sapien
atgaagactcgtccctcgat

SEQ ID NO: 6097721 - DNA, 20 bp, Homo sapien
atcgagggacgagtcttcat

SEQ ID NO: 6097722 - DNA, 20 bp, Homo sapien
atgaacgtctacgcgatcct

SEQ ID NO: 6097723 - DNA, 20 bp, Homo sapien
aggatcgcgtagacgttcat

SEQ ID NO: 6097724 - DNA, 20 bp, Homo sapien
atctacgatcctcgctaagt

SEQ ID NO: 6097725 - DNA, 20 bp, Homo sapien
acttagcgaggatcgtagat

SEQ ID NO: 6097726 - DNA, 20 bp, Homo sapien
atcgtggctaccgctcgaat

SEQ ID NO: 6097727 - DNA, 20 bp, Homo sapien
attcgagcggtagccacgat

SEQ ID NO: 6097728 - DNA, 20 bp, Homo sapien
atcgacggtcctcgcaagat

SEQ ID NO: 6097729 - DNA, 20 bp, Homo sapien
atcttgcgaggaccgtcgat

SEQ ID NO: 6097730 - DNA, 20 bp, Homo sapien
atcacccatagtctacaggt

SEQ ID NO: 6097731 - DNA, 20 bp, Homo sapien
acctgtagactatgggtgat

SEQ ID NO: 6097732 - DNA, 20 bp, Homo sapien
cattgggcgatagtctagct

SEQ ID NO: 6097733 - DNA, 20 bp, Homo sapien
agctagactatcgcccaatg

SEQ ID NO: 6097734 - DNA, 20 bp, Homo sapien
atatagcctagtcgtccagt

SEQ ID NO: 6097735 - DNA, 20 bp, Homo sapien
actggacgactaggctatat

SEQ ID NO: 6097736 - DNA, 20 bp, Homo sapien
atataccgtgtagcaacgct

SEQ ID NO: 6097737 - DNA, 20 bp, Homo sapien
agcgttgctacacggtatat

SEQ ID NO: 6097738 - DNA, 20 bp, Homo sapien
atactaggtacgctgagcct

SEQ ID NO: 6097739 - DNA, 20 bp, Homo sapien
aggctcagcgtacctagtat

SEQ ID NO: 6097740 - DNA, 20 bp, Homo sapien
atacggctgccagtccgatt

SEQ ID NO: 6097741 - DNA, 20 bp, Homo sapien
aatcggactggcagccgtat

SEQ ID NO: 6097742 - DNA, 20 bp, Homo sapien
aggtcggctgcacgctaaat

SEQ ID NO: 6097743 - DNA, 20 bp, Homo sapien
atttagcgtgcagccgacct

SEQ ID NO: 6097744 - DNA, 20 bp, Homo sapien
aggtagatcgacatcggctt

SEQ ID NO: 6097745 - DNA, 20 bp, Homo sapien
aagccgatgtcgatctacct

SEQ ID NO: 6097746 - DNA, 20 bp, Homo sapien
agggtctctacgctgacgat

SEQ ID NO: 6097747 - DNA, 20 bp, Homo sapien
atcgtcagcgtagagaccct

SEQ ID NO: 6097748 - DNA, 20 bp, Homo sapien
aggcccgtgccacagtatat

SEQ ID NO: 6097749 - DNA, 20 bp, Homo sapien
atatactgtggcacgggcct

SEQ ID NO: 6097750 - DNA, 20 bp, Homo sapien
agcttagcgacaatgccttt

SEQ ID NO: 6097751 - DNA, 20 bp, Homo sapien
aaaggcattgtcgctaagct

SEQ ID NO: 6097752 - DNA, 20 bp, Homo sapien
agcaggtctacgcctcaagt

SEQ ID NO: 6097753 - DNA, 20 bp, Homo sapien
acttgaggcgtagacctgct

SEQ ID NO: 6097754 - DNA, 20 bp, Homo sapien
cacggacgtatcgctatcag

SEQ ID NO: 6097755 - DNA, 20 bp, Homo sapien
ctgatagcgatacgtccgtg

SEQ ID NO: 6097756 - DNA, 20 bp, Homo sapien
agcactcatcctacgaaagt

SEQ ID NO: 6097757 - DNA, 20 bp, Homo sapien
actttcgtaggatgagtgct

SEQ ID NO: 6097758 - DNA, 20 bp, Homo sapien
agactcgctagacggtcagt

SEQ ID NO: 6097759 - DNA, 20 bp, Homo sapien
actgaccgtctagcgagtct

SEQ ID NO: 6097760 - DNA, 20 bp, Homo sapien
agacgaaatgacgcatcggt

SEQ ID NO: 6097761 - DNA, 20 bp, Homo sapien
accgatgcgtcatttcgtct

SEQ ID NO: 6097762 - DNA, 20 bp, Homo sapien
actcccgctcgatagatagt

SEQ ID NO: 6097763 - DNA, 20 bp, Homo sapien
actatctatcgagcgggagt

SEQ ID NO: 6097764 - DNA, 20 bp, Homo sapien
actccagtgccaagtacgat

SEQ ID NO: 6097765 - DNA, 20 bp, Homo sapien
atcgtacttggcactggagt

SEQ ID NO: 6097766 - DNA, 20 bp, Homo sapien
actaagcgtgagcgccgatt

SEQ ID NO: 6097767 - DNA, 20 bp, Homo sapien
aatcggcgctcacgcttagt

SEQ ID NO: 6097768 - DNA, 20 bp, Homo sapien
acgcggcggtcagacaatat

SEQ ID NO: 6097769 - DNA, 20 bp, Homo sapien
atattgtctgaccgccgcgt

SEQ ID NO: 6097770 - DNA, 20 bp, Homo sapien
acgcggactgcaagcctaat

SEQ ID NO: 6097771 - DNA, 20 bp, Homo sapien
attaggcttgcagtccgcgt

SEQ ID NO: 6097772 - DNA, 20 bp, Homo sapien
acctgtccgacgcgagatat

SEQ ID NO: 6097773 - DNA, 20 bp, Homo sapien
atatctcgcgtcggacaggt

SEQ ID NO: 6097774 - DNA, 20 bp, Homo sapien
acctgagataccgtcggcat

SEQ ID NO: 6097775 - DNA, 20 bp, Homo sapien
atgccgacggtatctcaggt

SEQ ID NO: 6097776 - DNA, 20 bp, Homo sapien
atctgcatcactcgtactga

SEQ ID NO: 6097777 - DNA, 20 bp, Homo sapien
tcagtacgagtgatgcagat

SEQ ID NO: 6097778 - DNA, 20 bp, Homo sapien
acccacagtcgtagatgcgt

SEQ ID NO: 6097779 - DNA, 20 bp, Homo sapien
acgcatctacgactgtgggt

SEQ ID NO: 6097780 - DNA, 20 bp, Homo sapien
acaaaggctgaagcggccat

SEQ ID NO: 6097781 - DNA, 20 bp, Homo sapien
atggccgcttcagcctttgt

SEQ ID NO: 6097782 - DNA, 20 bp, Homo sapien
aatggcgacaactcgggcat

SEQ ID NO: 6097783 - DNA, 20 bp, Homo sapien
atgcccgagttgtcgccatt

SEQ ID NO: 6097784 - DNA, 20 bp, Homo sapien
aatcactctccatacagggt

SEQ ID NO: 6097785 - DNA, 20 bp, Homo sapien
accctgtatggagagtgatt

SEQ ID NO: 6097786 - DNA, 20 bp, Homo sapien
aatacgctgaatagagccct

SEQ ID NO: 6097787 - DNA, 20 bp, Homo sapien
agggctctattcagcgtatt

SEQ ID NO: 6097788 - DNA, 20 bp, Homo sapien
aataagagtcgtgcgtgcct

SEQ ID NO: 6097789 - DNA, 20 bp, Homo sapien
aggcacgcacgactcttatt

SEQ ID NO: 6097790 - DNA, 20 bp, Homo sapien
aaggcacgtatcatatccct

SEQ ID NO: 6097791 - DNA, 20 bp, Homo sapien
agggatatgatacgtgcctt

SEQ ID NO: 6097792 - DNA, 20 bp, Homo sapien
aactcactcgacgcgaatat

SEQ ID NO: 6097793 - DNA, 20 bp, Homo sapien
atattcgcgtcgagtgagtt

SEQ ID NO: 6097794 - DNA, 20 bp, Homo sapien
aacgggcatcagtcgaatct

SEQ ID NO: 6097795 - DNA, 20 bp, Homo sapien
agattcgactgatgcccgtt

SEQ ID NO: 6097796 - DNA, 20 bp, Homo sapien
aacacacgtagcataggcgt

SEQ ID NO: 6097797 - DNA, 20 bp, Homo sapien
acgcctatgctacgtgtgtt

SEQ ID NO: 6097798 - DNA, 20 bp, Homo sapien
ggcatcgctgttagtcgaat

SEQ ID NO: 6097799 - DNA, 20 bp, Homo sapien
attcgactaacagcgatgcc

SEQ ID NO: 6097800 - DNA, 20 bp, Homo sapien
aaatggacaccactatcgct

SEQ ID NO: 6097801 - DNA, 20 bp, Homo sapien
agcgatagtggtgtccattt

SEQ ID NO: 6097802 - DNA, 20 bp, Homo sapien
aaatgatctcaccgcgtact

SEQ ID NO: 6097803 - DNA, 20 bp, Homo sapien
agtacgcggtgagatcattt

SEQ ID NO: 6097804 - DNA, 20 bp, Homo sapien
aaatactatacgcagcgcct

SEQ ID NO: 6097805 - DNA, 20 bp, Homo sapien
aggcgctgcgtatagtattt

SEQ ID NO: 6097806 - DNA, 20 bp, Homo sapien
aaagtacctcgacagcgcat

SEQ ID NO: 6097807 - DNA, 20 bp, Homo sapien
atgcgctgtcgaggtacttt

SEQ ID NO: 6097808 - DNA, 20 bp, Homo sapien
aaaggaatcgcagacgcgct

SEQ ID NO: 6097809 - DNA, 20 bp, Homo sapien
agcgcgtctgcgattccttt

SEQ ID NO: 6097810 - DNA, 20 bp, Homo sapien
aaacatactcagcgaggctt

SEQ ID NO: 6097811 - DNA, 20 bp, Homo sapien
aagcctcgctgagtatgttt

SEQ ID NO: 6097812 - DNA, 20 bp, Homo sapien
ttgaatcgtttgaatcgcgg

SEQ ID NO: 6097813 - DNA, 20 bp, Homo sapien
ccgcgattcaaacgattcaa

SEQ ID NO: 6097814 - DNA, 20 bp, Homo sapien
ttagtatgtttcacacggcg

SEQ ID NO: 6097815 - DNA, 20 bp, Homo sapien
cgccgtgtgaaacatactaa

SEQ ID NO: 6097816 - DNA, 20 bp, Homo sapien
ttagatagtttcgctgccgg

SEQ ID NO: 6097817 - DNA, 20 bp, Homo sapien
ccggcagcgaaactatctaa

SEQ ID NO: 6097818 - DNA, 20 bp, Homo sapien
tgttagactttatcgcgccg

SEQ ID NO: 6097819 - DNA, 20 bp, Homo sapien
cggcgcgataaagtctaaca

SEQ ID NO: 6097820 - DNA, 20 bp, Homo sapien
ggcatcactggttacgtctg

SEQ ID NO: 6097821 - DNA, 20 bp, Homo sapien
cagacgtaaccagtgatgcc

SEQ ID NO: 6097822 - DNA, 20 bp, Homo sapien
tgcttatctttacaccggcg

SEQ ID NO: 6097823 - DNA, 20 bp, Homo sapien
cgccggtgtaaagataagca

SEQ ID NO: 6097824 - DNA, 20 bp, Homo sapien
tgcctctctttagtcgggag

SEQ ID NO: 6097825 - DNA, 20 bp, Homo sapien
ctcccgactaaagagaggca

SEQ ID NO: 6097826 - DNA, 20 bp, Homo sapien
tgccgtagtttcaacgtatg

SEQ ID NO: 6097827 - DNA, 20 bp, Homo sapien
catacgttgaaactacggca

SEQ ID NO: 6097828 - DNA, 20 bp, Homo sapien
tgaggtgctttgtactaacg

SEQ ID NO: 6097829 - DNA, 20 bp, Homo sapien
cgttagtacaaagcacctca

SEQ ID NO: 6097830 - DNA, 20 bp, Homo sapien
tcttgtccttgtagcgacgg

SEQ ID NO: 6097831 - DNA, 20 bp, Homo sapien
ccgtcgctacaaggacaaga

SEQ ID NO: 6097832 - DNA, 20 bp, Homo sapien
tctctcggtttactgacagg

SEQ ID NO: 6097833 - DNA, 20 bp, Homo sapien
cctgtcagtaaaccgagaga

SEQ ID NO: 6097834 - DNA, 20 bp, Homo sapien
tctccgtatttactcagagg

SEQ ID NO: 6097835 - DNA, 20 bp, Homo sapien
cctctgagtaaatacggaga

SEQ ID NO: 6097836 - DNA, 20 bp, Homo sapien
tctattcgttgtaggacagg

SEQ ID NO: 6097837 - DNA, 20 bp, Homo sapien
cctgtcctacaacgaataga

SEQ ID NO: 6097838 - DNA, 20 bp, Homo sapien
tctagcgatttactcctggg

SEQ ID NO: 6097839 - DNA, 20 bp, Homo sapien
cccaggagtaaatcgctaga

SEQ ID NO: 6097840 - DNA, 20 bp, Homo sapien
tctaatcatttacgacgcgg

SEQ ID NO: 6097841 - DNA, 20 bp, Homo sapien
ccgcgtcgtaaatgattaga

SEQ ID NO: 6097842 - DNA, 20 bp, Homo sapien
gatctgtctgacgctgtatg

SEQ ID NO: 6097843 - DNA, 20 bp, Homo sapien
catacagcgtcagacagatc

SEQ ID NO: 6097844 - DNA, 20 bp, Homo sapien
tcgtttgattctcggcccag

SEQ ID NO: 6097845 - DNA, 20 bp, Homo sapien
ctgggccgagaatcaaacga

SEQ ID NO: 6097846 - DNA, 20 bp, Homo sapien
tcgtcacgtttaggactatg

SEQ ID NO: 6097847 - DNA, 20 bp, Homo sapien
catagtcctaaacgtgacga

SEQ ID NO: 6097848 - DNA, 20 bp, Homo sapien
tcctcgcatttaatagtcgg

SEQ ID NO: 6097849 - DNA, 20 bp, Homo sapien
ccgactattaaatgcgagga

SEQ ID NO: 6097850 - DNA, 20 bp, Homo sapien
tccgcgaatttacacctatg

SEQ ID NO: 6097851 - DNA, 20 bp, Homo sapien
cataggtgtaaattcgcgga

SEQ ID NO: 6097852 - DNA, 20 bp, Homo sapien
tcacagttggtactacttgg

SEQ ID NO: 6097853 - DNA, 20 bp, Homo sapien
ccaagtagtaccaactgtga

SEQ ID NO: 6097854 - DNA, 20 bp, Homo sapien
tattctagttctggacacgg

SEQ ID NO: 6097855 - DNA, 20 bp, Homo sapien
ccgtgtccagaactagaata

SEQ ID NO: 6097856 - DNA, 20 bp, Homo sapien
tatacttattgaggtcgcgg

SEQ ID NO: 6097857 - DNA, 20 bp, Homo sapien
ccgcgacctcaataagtata

SEQ ID NO: 6097858 - DNA, 20 bp, Homo sapien
tataattcttcatccgccgg

SEQ ID NO: 6097859 - DNA, 20 bp, Homo sapien
ccggcggatgaagaattata

SEQ ID NO: 6097860 - DNA, 20 bp, Homo sapien
tataaaccttgcgtcgagtg

SEQ ID NO: 6097861 - DNA, 20 bp, Homo sapien
cactcgacgcaaggtttata

SEQ ID NO: 6097862 - DNA, 20 bp, Homo sapien
tagtaaagttgcgtcactgg

SEQ ID NO: 6097863 - DNA, 20 bp, Homo sapien
ccagtgacgcaactttacta

SEQ ID NO: 6097864 - DNA, 20 bp, Homo sapien
gatctgattacgtctctcgc

SEQ ID NO: 6097865 - DNA, 20 bp, Homo sapien
gcgagagacgtaatcagatc

SEQ ID NO: 6097866 - DNA, 20 bp, Homo sapien
tacgattattgactagcggg

SEQ ID NO: 6097867 - DNA, 20 bp, Homo sapien
cccgctagtcaataatcgta

SEQ ID NO: 6097868 - DNA, 20 bp, Homo sapien
taatctaattctggtcgcgg

SEQ ID NO: 6097869 - DNA, 20 bp, Homo sapien
ccgcgaccagaattagatta

SEQ ID NO: 6097870 - DNA, 20 bp, Homo sapien
taagtcttgattacgtggcg

SEQ ID NO: 6097871 - DNA, 20 bp, Homo sapien
cgccacgtaatcaagactta

SEQ ID NO: 6097872 - DNA, 20 bp, Homo sapien
taagggtattgcgcctcctg

SEQ ID NO: 6097873 - DNA, 20 bp, Homo sapien
caggaggcgcaataccctta

SEQ ID NO: 6097874 - DNA, 20 bp, Homo sapien
taagactctctgttcggagg

SEQ ID NO: 6097875 - DNA, 20 bp, Homo sapien
cctccgaacagagagtctta

SEQ ID NO: 6097876 - DNA, 20 bp, Homo sapien
taacggccttgcgtaatatg

SEQ ID NO: 6097877 - DNA, 20 bp, Homo sapien
catattacgcaaggccgtta

SEQ ID NO: 6097878 - DNA, 20 bp, Homo sapien
taaccgtattgcataacgcg

SEQ ID NO: 6097879 - DNA, 20 bp, Homo sapien
cgcgttatgcaatacggtta

SEQ ID NO: 6097880 - DNA, 20 bp, Homo sapien
taaatctgttcagctaccgg

SEQ ID NO: 6097881 - DNA, 20 bp, Homo sapien
ccggtagctgaacagattta

SEQ ID NO: 6097882 - DNA, 20 bp, Homo sapien
taaagtacgtgtatcgtgcg

SEQ ID NO: 6097883 - DNA, 20 bp, Homo sapien
cgcacgatacacgtacttta

SEQ ID NO: 6097884 - DNA, 20 bp, Homo sapien
taaactacttgaggcgtctg

SEQ ID NO: 6097885 - DNA, 20 bp, Homo sapien
cagacgcctcaagtagttta

SEQ ID NO: 6097886 - DNA, 20 bp, Homo sapien
cgtctgcgtgatagtatatg

SEQ ID NO: 6097887 - DNA, 20 bp, Homo sapien
catatactatcacgcagacg

SEQ ID NO: 6097888 - DNA, 20 bp, Homo sapien
gttcttcattctacgcacgg

SEQ ID NO: 6097889 - DNA, 20 bp, Homo sapien
ccgtgcgtagaatgaagaac

SEQ ID NO: 6097890 - DNA, 20 bp, Homo sapien
gttctctattatgccgacgg

SEQ ID NO: 6097891 - DNA, 20 bp, Homo sapien
ccgtcggcataatagagaac

SEQ ID NO: 6097892 - DNA, 20 bp, Homo sapien
gtgcccggttctctatatgg

SEQ ID NO: 6097893 - DNA, 20 bp, Homo sapien
ccatatagagaaccgggcac

SEQ ID NO: 6097894 - DNA, 20 bp, Homo sapien
gtcttgacttaatgtcgcgg

SEQ ID NO: 6097895 - DNA, 20 bp, Homo sapien
ccgcgacattaagtcaagac

SEQ ID NO: 6097896 - DNA, 20 bp, Homo sapien
gtcttctattatacgagcgg

SEQ ID NO: 6097897 - DNA, 20 bp, Homo sapien
ccgctcgtataatagaagac

SEQ ID NO: 6097898 - DNA, 20 bp, Homo sapien
gtcctcaattatcgagtagg

SEQ ID NO: 6097899 - DNA, 20 bp, Homo sapien
cctactcgataattgaggac

SEQ ID NO: 6097900 - DNA, 20 bp, Homo sapien
gtatctaattcgtgagtcgg

SEQ ID NO: 6097901 - DNA, 20 bp, Homo sapien
ccgactcacgaattagatac

SEQ ID NO: 6097902 - DNA, 20 bp, Homo sapien
gtatagtcttatgctaccgg

SEQ ID NO: 6097903 - DNA, 20 bp, Homo sapien
ccggtagcataagactatac

SEQ ID NO: 6097904 - DNA, 20 bp, Homo sapien
gtacatagttctaccgactg

SEQ ID NO: 6097905 - DNA, 20 bp, Homo sapien
cagtcggtagaactatgtac

SEQ ID NO: 6097906 - DNA, 20 bp, Homo sapien
gtacagtgttcccgtatctg

SEQ ID NO: 6097907 - DNA, 20 bp, Homo sapien
cagatacgggaacactgtac

SEQ ID NO: 6097908 - DNA, 20 bp, Homo sapien
cgtctgacttaatcgagatg

SEQ ID NO: 6097909 - DNA, 20 bp, Homo sapien
catctcgattaagtcagacg

SEQ ID NO: 6097910 - DNA, 20 bp, Homo sapien
gtacactattctacacctgg

SEQ ID NO: 6097911 - DNA, 20 bp, Homo sapien
ccaggtgtagaatagtgtac

SEQ ID NO: 6097912 - DNA, 20 bp, Homo sapien
gtaactgcttcgtatcaagg

SEQ ID NO: 6097913 - DNA, 20 bp, Homo sapien
ccttgatacgaagcagttac

SEQ ID NO: 6097914 - DNA, 20 bp, Homo sapien
gtaacgcttgacgtagattg

SEQ ID NO: 6097915 - DNA, 20 bp, Homo sapien
caatctacgtcaagcgttac

SEQ ID NO: 6097916 - DNA, 20 bp, Homo sapien
ggtctctctcgttataggcg

SEQ ID NO: 6097917 - DNA, 20 bp, Homo sapien
cgcctataacgagagagacc

SEQ ID NO: 6097918 - DNA, 20 bp, Homo sapien
ggtacagcttcgtaagtatg

SEQ ID NO: 6097919 - DNA, 20 bp, Homo sapien
catacttacgaagctgtacc

SEQ ID NO: 6097920 - DNA, 20 bp, Homo sapien
gctttcgtattatcgccacg

SEQ ID NO: 6097921 - DNA, 20 bp, Homo sapien
cgtggcgataatacgaaagc

SEQ ID NO: 6097922 - DNA, 20 bp, Homo sapien
gcgttcgagtcgtcttaatg

SEQ ID NO: 6097923 - DNA, 20 bp, Homo sapien
cattaagacgactcgaacgc

SEQ ID NO: 6097924 - DNA, 20 bp, Homo sapien
gcgcctattgaactaagtgg

SEQ ID NO: 6097925 - DNA, 20 bp, Homo sapien
ccacttagttcaataggcgc

SEQ ID NO: 6097926 - DNA, 20 bp, Homo sapien
gcgaatagttccacgtctgg

SEQ ID NO: 6097927 - DNA, 20 bp, Homo sapien
ccagacgtggaactattcgc

SEQ ID NO: 6097928 - DNA, 20 bp, Homo sapien
gcctcacttagtattacgtg

SEQ ID NO: 6097929 - DNA, 20 bp, Homo sapien
cacgtaatactaagtgaggc

SEQ ID NO: 6097930 - DNA, 20 bp, Homo sapien
ccatatacttacacagcagg

SEQ ID NO: 6097931 - DNA, 20 bp, Homo sapien
cctgctgtgtaagtatatgg

SEQ ID NO: 6097932 - DNA, 20 bp, Homo sapien
tatctatattgactgcgcgg

SEQ ID NO: 6097933 - DNA, 20 bp, Homo sapien
ccgcgcagtcaatatagata

SEQ ID NO: 6097934 - DNA, 20 bp, Homo sapien
gattctacaagattagcggg

SEQ ID NO: 6097935 - DNA, 20 bp, Homo sapien
cccgctaatcttgtagaatc

SEQ ID NO: 6097936 - DNA, 20 bp, Homo sapien
gatcaattacagttaggccg

SEQ ID NO: 6097937 - DNA, 20 bp, Homo sapien
cggcctaactgtaattgatc

SEQ ID NO: 6097938 - DNA, 20 bp, Homo sapien
gacttacattagtagcacgg

SEQ ID NO: 6097939 - DNA, 20 bp, Homo sapien
ccgtgctactaatgtaagtc

SEQ ID NO: 6097940 - DNA, 20 bp, Homo sapien
gaactcattagtccgaatcg

SEQ ID NO: 6097941 - DNA, 20 bp, Homo sapien
cgattcggactaatgagttc

SEQ ID NO: 6097942 - DNA, 20 bp, Homo sapien
cttcaatacagtcttagcgg

SEQ ID NO: 6097943 - DNA, 20 bp, Homo sapien
ccgctaagactgtattgaag

SEQ ID NO: 6097944 - DNA, 20 bp, Homo sapien
cttatcggctattagagtcg

SEQ ID NO: 6097945 - DNA, 20 bp, Homo sapien
cgactctaatagccgataag

SEQ ID NO: 6097946 - DNA, 20 bp, Homo sapien
ctgtactatactcttacgcg

SEQ ID NO: 6097947 - DNA, 20 bp, Homo sapien
cgcgtaagagtatagtacag

SEQ ID NO: 6097948 - DNA, 20 bp, Homo sapien
ctggtaacttatacagctcg

SEQ ID NO: 6097949 - DNA, 20 bp, Homo sapien
cgagctgtataagttaccag

SEQ ID NO: 6097950 - DNA, 20 bp, Homo sapien
ctggctattaagctatacgg

SEQ ID NO: 6097951 - DNA, 20 bp, Homo sapien
ccgtatagcttaatagccag

SEQ ID NO: 6097952 - DNA, 20 bp, Homo sapien
ctggaccttaatcgtgtgcg

SEQ ID NO: 6097953 - DNA, 20 bp, Homo sapien
cgcacacgattaaggtccag

SEQ ID NO: 6097954 - DNA, 20 bp, Homo sapien
cagactcttacacaatcgtg

SEQ ID NO: 6097955 - DNA, 20 bp, Homo sapien
cacgattgtgtaagagtctg

SEQ ID NO: 6097956 - DNA, 20 bp, Homo sapien
ctgacacattagtaacgtcg

SEQ ID NO: 6097957 - DNA, 20 bp, Homo sapien
cgacgttactaatgtgtcag

SEQ ID NO: 6097958 - DNA, 20 bp, Homo sapien
ctgaacacttatagacacgg

SEQ ID NO: 6097959 - DNA, 20 bp, Homo sapien
ccgtgtctataagtgttcag

SEQ ID NO: 6097960 - DNA, 20 bp, Homo sapien
ctcgtgtataataatgcggg

SEQ ID NO: 6097961 - DNA, 20 bp, Homo sapien
cccgcattattatacacgag

SEQ ID NO: 6097962 - DNA, 20 bp, Homo sapien
ctcctgattaactctacgtg

SEQ ID NO: 6097963 - DNA, 20 bp, Homo sapien
cacgtagagttaatcaggag

SEQ ID NO: 6097964 - DNA, 20 bp, Homo sapien
ctccagtgttaaacgatgtg

SEQ ID NO: 6097965 - DNA, 20 bp, Homo sapien
cacatcgtttaacactggag

SEQ ID NO: 6097966 - DNA, 20 bp, Homo sapien
ctcaatcttactcacgtagg

SEQ ID NO: 6097967 - DNA, 20 bp, Homo sapien
cctacgtgagtaagattgag

SEQ ID NO: 6097968 - DNA, 20 bp, Homo sapien
ctatatccttaccgcgtatg

SEQ ID NO: 6097969 - DNA, 20 bp, Homo sapien
catacgcggtaaggatatag

SEQ ID NO: 6097970 - DNA, 20 bp, Homo sapien
ctataacgtgagcttagagg

SEQ ID NO: 6097971 - DNA, 20 bp, Homo sapien
cctctaagctcacgttatag

SEQ ID NO: 6097972 - DNA, 20 bp, Homo sapien
ctagtcattacgcctcgttg

SEQ ID NO: 6097973 - DNA, 20 bp, Homo sapien
caacgaggcgtaatgactag

SEQ ID NO: 6097974 - DNA, 20 bp, Homo sapien
ctaccgacttactgcaaatg

SEQ ID NO: 6097975 - DNA, 20 bp, Homo sapien
catttgcagtaagtcggtag

SEQ ID NO: 6097976 - DNA, 20 bp, Homo sapien
atgatgtgcaaagtgccgtc

SEQ ID NO: 6097977 - DNA, 20 bp, Homo sapien
gacggcactttgcacatcat

SEQ ID NO: 6097978 - DNA, 20 bp, Homo sapien
ctaacggattactcagactg

SEQ ID NO: 6097979 - DNA, 20 bp, Homo sapien
cagtctgagtaatccgttag

SEQ ID NO: 6097980 - DNA, 20 bp, Homo sapien
cgtctagcttaatacctctg

SEQ ID NO: 6097981 - DNA, 20 bp, Homo sapien
cagaggtattaagctagacg

SEQ ID NO: 6097982 - DNA, 20 bp, Homo sapien
cgtcgcccttaatctatatg

SEQ ID NO: 6097983 - DNA, 20 bp, Homo sapien
catatagattaagggcgacg

SEQ ID NO: 6097984 - DNA, 20 bp, Homo sapien
cgtatcgcttaacctctatg

SEQ ID NO: 6097985 - DNA, 20 bp, Homo sapien
catagaggttaagcgatacg

SEQ ID NO: 6097986 - DNA, 20 bp, Homo sapien
cgtacagcttacctactatg

SEQ ID NO: 6097987 - DNA, 20 bp, Homo sapien
catagtaggtaagctgtacg

SEQ ID NO: 6097988 - DNA, 20 bp, Homo sapien
cgccagttaatcacctgagg

SEQ ID NO: 6097989 - DNA, 20 bp, Homo sapien
cctcaggtgattaactggcg

SEQ ID NO: 6097990 - DNA, 20 bp, Homo sapien
cgataccgtgtccgtagatg

SEQ ID NO: 6097991 - DNA, 20 bp, Homo sapien
catctacggacacggtatcg

SEQ ID NO: 6097992 - DNA, 20 bp, Homo sapien
cctgcacgttagaacactgg

SEQ ID NO: 6097993 - DNA, 20 bp, Homo sapien
ccagtgttctaacgtgcagg

SEQ ID NO: 6097994 - DNA, 20 bp, Homo sapien
cctcgatatgtacggatagg

SEQ ID NO: 6097995 - DNA, 20 bp, Homo sapien
cctatccgtacatatcgagg

SEQ ID NO: 6097996 - DNA, 20 bp, Homo sapien
cctacgattaagcaatagcg

SEQ ID NO: 6097997 - DNA, 20 bp, Homo sapien
cgctattgcttaatcgtagg

SEQ ID NO: 6097998 - DNA, 20 bp, Homo sapien
agcgccgcgtgagacaatat

SEQ ID NO: 6097999 - DNA, 20 bp, Homo sapien
atattgtctcacgcggcgct

SEQ ID NO: 6098000 - DNA, 20 bp, Homo sapien
ccggcacttaatagtatctg

SEQ ID NO: 6098001 - DNA, 20 bp, Homo sapien
cagatactattaagtgccgg

SEQ ID NO: 6098002 - DNA, 20 bp, Homo sapien
ccctaagatggtcaagcgtg

SEQ ID NO: 6098003 - DNA, 20 bp, Homo sapien
cacgcttgaccatcttaggg

SEQ ID NO: 6098004 - DNA, 20 bp, Homo sapien
cccaacattaacgcagagtg

SEQ ID NO: 6098005 - DNA, 20 bp, Homo sapien
cactctgcgttaatgttggg

SEQ ID NO: 6098006 - DNA, 20 bp, Homo sapien
catgactattaacctagcgg

SEQ ID NO: 6098007 - DNA, 20 bp, Homo sapien
ccgctaggttaatagtcatg

SEQ ID NO: 6098008 - DNA, 20 bp, Homo sapien
catctactgggtcaaggtcg

SEQ ID NO: 6098009 - DNA, 20 bp, Homo sapien
cgaccttgacccagtagatg

SEQ ID NO: 6098010 - DNA, 20 bp, Homo sapien
catcctcgtcctagataaag

SEQ ID NO: 6098011 - DNA, 20 bp, Homo sapien
ctttatctaggacgaggatg

SEQ ID NO: 6098012 - DNA, 20 bp, Homo sapien
cagactaatctccgtcaggg

SEQ ID NO: 6098013 - DNA, 20 bp, Homo sapien
ccctgacggagattagtctg

SEQ ID NO: 6098014 - DNA, 20 bp, Homo sapien
cagacattaacaactcgtcg

SEQ ID NO: 6098015 - DNA, 20 bp, Homo sapien
cgacgagttgttaatgtctg

SEQ ID NO: 6098016 - DNA, 20 bp, Homo sapien
cacctctctactaagatagg

SEQ ID NO: 6098017 - DNA, 20 bp, Homo sapien
cctatcttagtagagaggtg

SEQ ID NO: 6098018 - DNA, 20 bp, Homo sapien
caccgctatctcgtaagagg

SEQ ID NO: 6098019 - DNA, 20 bp, Homo sapien
cctcttacgagatagcggtg

SEQ ID NO: 6098020 - DNA, 20 bp, Homo sapien
tatctcgcttgctatcaacg

SEQ ID NO: 6098021 - DNA, 20 bp, Homo sapien
cgttgatagcaagcgagata

SEQ ID NO: 6098022 - DNA, 20 bp, Homo sapien
caccatattacgacacgttg

SEQ ID NO: 6098023 - DNA, 20 bp, Homo sapien
caacgtgtcgtaatatggtg

SEQ ID NO: 6098024 - DNA, 20 bp, Homo sapien
cacagtgctaactaagtagg

SEQ ID NO: 6098025 - DNA, 20 bp, Homo sapien
cctacttagttagcactgtg

SEQ ID NO: 6098026 - DNA, 20 bp, Homo sapien
atttctcgttacaccgcatg

SEQ ID NO: 6098027 - DNA, 20 bp, Homo sapien
catgcggtgtaacgagaaat

SEQ ID NO: 6098028 - DNA, 20 bp, Homo sapien
atttatctaacctctgcgcg

SEQ ID NO: 6098029 - DNA, 20 bp, Homo sapien
cgcgcagaggttagataaat

SEQ ID NO: 6098030 - DNA, 20 bp, Homo sapien
attctaatcaatcgtcgcgg

SEQ ID NO: 6098031 - DNA, 20 bp, Homo sapien
ccgcgacgattgattagaat

SEQ ID NO: 6098032 - DNA, 20 bp, Homo sapien
atgtcgtaacagtacctgag

SEQ ID NO: 6098033 - DNA, 20 bp, Homo sapien
ctcaggtactgttacgacat

SEQ ID NO: 6098034 - DNA, 20 bp, Homo sapien
atgtatccgaagtcgtagtg

SEQ ID NO: 6098035 - DNA, 20 bp, Homo sapien
cactacgacttcggatacat

SEQ ID NO: 6098036 - DNA, 20 bp, Homo sapien
atattacgcaaagtgcaggg

SEQ ID NO: 6098037 - DNA, 20 bp, Homo sapien
ccctgcactttgcgtaatat

SEQ ID NO: 6098038 - DNA, 20 bp, Homo sapien
atatcagctaatagggtcgg

SEQ ID NO: 6098039 - DNA, 20 bp, Homo sapien
ccgaccctattagctgatat

SEQ ID NO: 6098040 - DNA, 20 bp, Homo sapien
atagcagatagtctaacggg

SEQ ID NO: 6098041 - DNA, 20 bp, Homo sapien
cccgttagactatctgctat

SEQ ID NO: 6098042 - DNA, 20 bp, Homo sapien
ggcagctatgtctgagtcta

SEQ ID NO: 6098043 - DNA, 20 bp, Homo sapien
tagactcagacatagctgcc

SEQ ID NO: 6098044 - DNA, 20 bp, Homo sapien
atacgtcttaccgcacatag

SEQ ID NO: 6098045 - DNA, 20 bp, Homo sapien
ctatgtgcggtaagacgtat

SEQ ID NO: 6098046 - DNA, 20 bp, Homo sapien
ataaccatgcctcaatcggg

SEQ ID NO: 6098047 - DNA, 20 bp, Homo sapien
cccgattgaggcatggttat

SEQ ID NO: 6098048 - DNA, 20 bp, Homo sapien
ataaagctctatactccgcg

SEQ ID NO: 6098049 - DNA, 20 bp, Homo sapien
cgcggagtatagagctttat

SEQ ID NO: 6098050 - DNA, 20 bp, Homo sapien
agtcctactactcgtacatg

SEQ ID NO: 6098051 - DNA, 20 bp, Homo sapien
catgtacgagtagtaggact

SEQ ID NO: 6098052 - DNA, 20 bp, Homo sapien
agcaacagtcgtataactcg

SEQ ID NO: 6098053 - DNA, 20 bp, Homo sapien
cgagttatacgactgttgct

SEQ ID NO: 6098054 - DNA, 20 bp, Homo sapien
agaccgtatcgtccacagtg

SEQ ID NO: 6098055 - DNA, 20 bp, Homo sapien
cactgtggacgatacggtct

SEQ ID NO: 6098056 - DNA, 20 bp, Homo sapien
agaacccatcgtagacagtg

SEQ ID NO: 6098057 - DNA, 20 bp, Homo sapien
cactgtctacgatgggttct

SEQ ID NO: 6098058 - DNA, 20 bp, Homo sapien
actcgcaatctcgaactagg

SEQ ID NO: 6098059 - DNA, 20 bp, Homo sapien
cctagttcgagattgcgagt

SEQ ID NO: 6098060 - DNA, 20 bp, Homo sapien
acggatactcctcatacttg

SEQ ID NO: 6098061 - DNA, 20 bp, Homo sapien
caagtatgaggagtatccgt

SEQ ID NO: 6098062 - DNA, 20 bp, Homo sapien
acgactatgagccgacgtag

SEQ ID NO: 6098063 - DNA, 20 bp, Homo sapien
ctacgtcggctcatagtcgt

SEQ ID NO: 6098064 - DNA, 20 bp, Homo sapien
gatctgacttagtagtggct

SEQ ID NO: 6098065 - DNA, 20 bp, Homo sapien
agccactactaagtcagatc

SEQ ID NO: 6098066 - DNA, 20 bp, Homo sapien
accgtaaatgaatcacgctg

SEQ ID NO: 6098067 - DNA, 20 bp, Homo sapien
cagcgtgattcatttacggt

SEQ ID NO: 6098068 - DNA, 20 bp, Homo sapien
acacgacctcgaagtcagtg

SEQ ID NO: 6098069 - DNA, 20 bp, Homo sapien
cactgacttcgaggtcgtgt

SEQ ID NO: 6098070 - DNA, 20 bp, Homo sapien
acacctgtgaagaatatccg

SEQ ID NO: 6098071 - DNA, 20 bp, Homo sapien
cggatattcttcacaggtgt

SEQ ID NO: 6098072 - DNA, 20 bp, Homo sapien
acacaccgtcgaatcaagtg

SEQ ID NO: 6098073 - DNA, 20 bp, Homo sapien
cacttgattcgacggtgtgt

SEQ ID NO: 6098074 - DNA, 20 bp, Homo sapien
aattctctaatcagacggcg

SEQ ID NO: 6098075 - DNA, 20 bp, Homo sapien
cgccgtctgattagagaatt

SEQ ID NO: 6098076 - DNA, 20 bp, Homo sapien
aattcatccatcgaccggag

SEQ ID NO: 6098077 - DNA, 20 bp, Homo sapien
ctccggtcgatggatgaatt

SEQ ID NO: 6098078 - DNA, 20 bp, Homo sapien
aattacgccaactctagctg

SEQ ID NO: 6098079 - DNA, 20 bp, Homo sapien
cagctagagttggcgtaatt

SEQ ID NO: 6098080 - DNA, 20 bp, Homo sapien
aatatctataacacgcgccg

SEQ ID NO: 6098081 - DNA, 20 bp, Homo sapien
cggcgcgtgttatagatatt

SEQ ID NO: 6098082 - DNA, 20 bp, Homo sapien
aatatcgtaagacatccgcg

SEQ ID NO: 6098083 - DNA, 20 bp, Homo sapien
cgcggatgtcttacgatatt

SEQ ID NO: 6098084 - DNA, 20 bp, Homo sapien
aatatcccatactcgaagcg

SEQ ID NO: 6098085 - DNA, 20 bp, Homo sapien
cgcttcgagtatgggatatt

SEQ ID NO: 6098086 - DNA, 20 bp, Homo sapien
gatctctattactatggcgg

SEQ ID NO: 6098087 - DNA, 20 bp, Homo sapien
ccgccatagtaatagagatc

SEQ ID NO: 6098088 - DNA, 20 bp, Homo sapien
aataacggtatcgcgctgcg

SEQ ID NO: 6098089 - DNA, 20 bp, Homo sapien
cgcagcgcgataccgttatt

SEQ ID NO: 6098090 - DNA, 20 bp, Homo sapien
aactgctcaaacgtcacgag

SEQ ID NO: 6098091 - DNA, 20 bp, Homo sapien
ctcgtgacgtttgagcagtt

SEQ ID NO: 6098092 - DNA, 20 bp, Homo sapien
aactaacatcgacggcatgg

SEQ ID NO: 6098093 - DNA, 20 bp, Homo sapien
ccatgccgtcgatgttagtt

SEQ ID NO: 6098094 - DNA, 20 bp, Homo sapien
aacaatagtagcgtagctcg

SEQ ID NO: 6098095 - DNA, 20 bp, Homo sapien
cgagctacgctactattgtt

SEQ ID NO: 6098096 - DNA, 20 bp, Homo sapien
aaagatcctacatacgctcg

SEQ ID NO: 6098097 - DNA, 20 bp, Homo sapien
cgagcgtatgtaggatcttt

SEQ ID NO: 6098098 - DNA, 20 bp, Homo sapien
ttgtttaattggcgcgaagc

SEQ ID NO: 6098099 - DNA, 20 bp, Homo sapien
gcttcgcgccaattaaacaa

SEQ ID NO: 6098100 - DNA, 20 bp, Homo sapien
ttgtgaggtttggctcccac

SEQ ID NO: 6098101 - DNA, 20 bp, Homo sapien
gtgggagccaaacctcacaa

SEQ ID NO: 6098102 - DNA, 20 bp, Homo sapien
ttgatagctttggcggtccc

SEQ ID NO: 6098103 - DNA, 20 bp, Homo sapien
gggaccgccaaagctatcaa

SEQ ID NO: 6098104 - DNA, 20 bp, Homo sapien
ttacgcggtgtttcgctcac

SEQ ID NO: 6098105 - DNA, 20 bp, Homo sapien
gtgagcgaaacaccgcgtaa

SEQ ID NO: 6098106 - DNA, 20 bp, Homo sapien
tgttcgcgtttatgacggcc

SEQ ID NO: 6098107 - DNA, 20 bp, Homo sapien
ggccgtcataaacgcgaaca

SEQ ID NO: 6098108 - DNA, 20 bp, Homo sapien
cttgatacgactgtcatggc

SEQ ID NO: 6098109 - DNA, 20 bp, Homo sapien
gccatgacagtcgtatcaag

SEQ ID NO: 6098110 - DNA, 20 bp, Homo sapien
tctttgcgtttacggagagc

SEQ ID NO: 6098111 - DNA, 20 bp, Homo sapien
gctctccgtaaacgcaaaga

SEQ ID NO: 6098112 - DNA, 20 bp, Homo sapien
tcggttgcttggatgtaccc

SEQ ID NO: 6098113 - DNA, 20 bp, Homo sapien
gggtacatccaagcaaccga

SEQ ID NO: 6098114 - DNA, 20 bp, Homo sapien
tccgtctgttgagttaggcc

SEQ ID NO: 6098115 - DNA, 20 bp, Homo sapien
ggcctaactcaacagacgga

SEQ ID NO: 6098116 - DNA, 20 bp, Homo sapien
tccctattggtacgtgtggc

SEQ ID NO: 6098117 - DNA, 20 bp, Homo sapien
gccacacgtaccaataggga

SEQ ID NO: 6098118 - DNA, 20 bp, Homo sapien
tacgtgttgatagttcggac

SEQ ID NO: 6098119 - DNA, 20 bp, Homo sapien
gtccgaactatcaacacgta

SEQ ID NO: 6098120 - DNA, 20 bp, Homo sapien
taatagtatgttccgtccgc

SEQ ID NO: 6098121 - DNA, 20 bp, Homo sapien
gcggacggaacatactatta

SEQ ID NO: 6098122 - DNA, 20 bp, Homo sapien
gtttcttattagcgaggagc

SEQ ID NO: 6098123 - DNA, 20 bp, Homo sapien
gctcctcgctaataagaaac

SEQ ID NO: 6098124 - DNA, 20 bp, Homo sapien
gttattctgtatccggcggc

SEQ ID NO: 6098125 - DNA, 20 bp, Homo sapien
gccgccggatacagaataac

SEQ ID NO: 6098126 - DNA, 20 bp, Homo sapien
gtgtctggtgttcgataccc

SEQ ID NO: 6098127 - DNA, 20 bp, Homo sapien
gggtatcgaacaccagacac

SEQ ID NO: 6098128 - DNA, 20 bp, Homo sapien
gtattctgaaaggttagcgc

SEQ ID NO: 6098129 - DNA, 20 bp, Homo sapien
gcgctaacctttcagaatac

SEQ ID NO: 6098130 - DNA, 20 bp, Homo sapien
cgtctcatgcctgcgtatag

SEQ ID NO: 6098131 - DNA, 20 bp, Homo sapien
ctatacgcaggcatgagacg

SEQ ID NO: 6098132 - DNA, 20 bp, Homo sapien
gctactaatggttacggtgc

SEQ ID NO: 6098133 - DNA, 20 bp, Homo sapien
gcaccgtaaccattagtagc

SEQ ID NO: 6098134 - DNA, 20 bp, Homo sapien
gcacgtcgtattaggtagtc

SEQ ID NO: 6098135 - DNA, 20 bp, Homo sapien
gactacctaatacgacgtgc

SEQ ID NO: 6098136 - DNA, 20 bp, Homo sapien
gataatgttaccatacgggc

SEQ ID NO: 6098137 - DNA, 20 bp, Homo sapien
gcccgtatggtaacattatc

SEQ ID NO: 6098138 - DNA, 20 bp, Homo sapien
gagtgtcctgtacgttagcc

SEQ ID NO: 6098139 - DNA, 20 bp, Homo sapien
ggctaacgtacaggacactc

SEQ ID NO: 6098140 - DNA, 20 bp, Homo sapien
gacttcgtgaaaggtgcttc

SEQ ID NO: 6098141 - DNA, 20 bp, Homo sapien
gaagcacctttcacgaagtc

SEQ ID NO: 6098142 - DNA, 20 bp, Homo sapien
cgtaacattcaagccagttc

SEQ ID NO: 6098143 - DNA, 20 bp, Homo sapien
gaactggcttgaatgttacg

SEQ ID NO: 6098144 - DNA, 20 bp, Homo sapien
atttgacgaacgtatgccgc

SEQ ID NO: 6098145 - DNA, 20 bp, Homo sapien
gcggcatacgttcgtcaaat

SEQ ID NO: 6098146 - DNA, 20 bp, Homo sapien
atttaatctactcgctcggc

SEQ ID NO: 6098147 - DNA, 20 bp, Homo sapien
gccgagcgagtagattaaat

SEQ ID NO: 6098148 - DNA, 20 bp, Homo sapien
atatgctaataacgtcgccc

SEQ ID NO: 6098149 - DNA, 20 bp, Homo sapien
gggcgacgttattagcatat

SEQ ID NO: 6098150 - DNA, 20 bp, Homo sapien
aggacatctagggatacgcc

SEQ ID NO: 6098151 - DNA, 20 bp, Homo sapien
ggcgtatccctagatgtcct

SEQ ID NO: 6098152 - DNA, 20 bp, Homo sapien
cgtctatcgtagtatatgcg

SEQ ID NO: 6098153 - DNA, 20 bp, Homo sapien
cgcatatactacgatagacg

SEQ ID NO: 6098154 - DNA, 20 bp, Homo sapien
tatcgtgttgcatctgcggc

SEQ ID NO: 6098155 - DNA, 20 bp, Homo sapien
gccgcagatgcaacacgata

SEQ ID NO: 6098156 - DNA, 20 bp, Homo sapien
aattaaggcactatacgcgc

SEQ ID NO: 6098157 - DNA, 20 bp, Homo sapien
gcgcgtatagtgccttaatt

SEQ ID NO: 6098158 - DNA, 20 bp, Homo sapien
aatatcaatcctaaggccgc

SEQ ID NO: 6098159 - DNA, 20 bp, Homo sapien
gcggccttaggattgatatt

SEQ ID NO: 6098160 - DNA, 20 bp, Homo sapien
aagtcacgtaatatcacgcc

SEQ ID NO: 6098161 - DNA, 20 bp, Homo sapien
ggcgtgatattacgtgactt

SEQ ID NO: 6098162 - DNA, 20 bp, Homo sapien
aagggtactagcgactgctc

SEQ ID NO: 6098163 - DNA, 20 bp, Homo sapien
gagcagtcgctagtaccctt

SEQ ID NO: 6098164 - DNA, 20 bp, Homo sapien
aagatcggcaggcgtcaaac

SEQ ID NO: 6098165 - DNA, 20 bp, Homo sapien
gtttgacgcctgccgatctt

SEQ ID NO: 6098166 - DNA, 20 bp, Homo sapien
aaagaatatacgcgctcgcc

SEQ ID NO: 6098167 - DNA, 20 bp, Homo sapien
ggcgagcgcgtatattcttt

SEQ ID NO: 6098168 - DNA, 20 bp, Homo sapien
tttacggctttggtagagca

SEQ ID NO: 6098169 - DNA, 20 bp, Homo sapien
tgctctaccaaagccgtaaa

SEQ ID NO: 6098170 - DNA, 20 bp, Homo sapien
ttcgcccgtttgctatacga

SEQ ID NO: 6098171 - DNA, 20 bp, Homo sapien
tcgtatagcaaacgggcgaa

SEQ ID NO: 6098172 - DNA, 20 bp, Homo sapien
ttcgaccctttgcgtgtgga

SEQ ID NO: 6098173 - DNA, 20 bp, Homo sapien
tccacacgcaaagggtcgaa

SEQ ID NO: 6098174 - DNA, 20 bp, Homo sapien
ttaccctctttcggctgaga

SEQ ID NO: 6098175 - DNA, 20 bp, Homo sapien
tctcagccgaaagagggtaa

SEQ ID NO: 6098176 - DNA, 20 bp, Homo sapien
cagacctctctagtcatagg

SEQ ID NO: 6098177 - DNA, 20 bp, Homo sapien
cctatgactagagaggtctg

SEQ ID NO: 6098178 - DNA, 20 bp, Homo sapien
tgttgtgtttaccgcgccga

SEQ ID NO: 6098179 - DNA, 20 bp, Homo sapien
tcggcgcggtaaacacaaca

SEQ ID NO: 6098180 - DNA, 20 bp, Homo sapien
tgtctacctttccgtcaaga

SEQ ID NO: 6098181 - DNA, 20 bp, Homo sapien
tcttgacggaaaggtagaca

SEQ ID NO: 6098182 - DNA, 20 bp, Homo sapien
tgtccgggtttcgtgatcca

SEQ ID NO: 6098183 - DNA, 20 bp, Homo sapien
tggatcacgaaacccggaca

SEQ ID NO: 6098184 - DNA, 20 bp, Homo sapien
tgaactttactcttcgggca

SEQ ID NO: 6098185 - DNA, 20 bp, Homo sapien
tgcccgaagagtaaagttca

SEQ ID NO: 6098186 - DNA, 20 bp, Homo sapien
tcgtttcttggtacggcgca

SEQ ID NO: 6098187 - DNA, 20 bp, Homo sapien
tgcgccgtaccaagaaacga

SEQ ID NO: 6098188 - DNA, 20 bp, Homo sapien
taacgtcgtgttcggtctga

SEQ ID NO: 6098189 - DNA, 20 bp, Homo sapien
tcagaccgaacacgacgtta

SEQ ID NO: 6098190 - DNA, 20 bp, Homo sapien
gttgaccgttagttatgcga

SEQ ID NO: 6098191 - DNA, 20 bp, Homo sapien
tcgcataactaacggtcaac

SEQ ID NO: 6098192 - DNA, 20 bp, Homo sapien
gcggacggttcgacactata

SEQ ID NO: 6098193 - DNA, 20 bp, Homo sapien
tatagtgtcgaaccgtccgc

SEQ ID NO: 6098194 - DNA, 20 bp, Homo sapien
gccgatcttcttacttacga

SEQ ID NO: 6098195 - DNA, 20 bp, Homo sapien
tcgtaagtaagaagatcggc

SEQ ID NO: 6098196 - DNA, 20 bp, Homo sapien
gcacccgttatgtcaactta

SEQ ID NO: 6098197 - DNA, 20 bp, Homo sapien
taagttgacataacgggtgc

SEQ ID NO: 6098198 - DNA, 20 bp, Homo sapien
atgatccatgagcgccgtga

SEQ ID NO: 6098199 - DNA, 20 bp, Homo sapien
tcacggcgctcatggatcat

SEQ ID NO: 6098200 - DNA, 20 bp, Homo sapien
gagtgacgttcctaccctga

SEQ ID NO: 6098201 - DNA, 20 bp, Homo sapien
tcagggtaggaacgtcactc

SEQ ID NO: 6098202 - DNA, 20 bp, Homo sapien
gactcggttatccgcgtgaa

SEQ ID NO: 6098203 - DNA, 20 bp, Homo sapien
ttcacgcggataaccgagtc

SEQ ID NO: 6098204 - DNA, 20 bp, Homo sapien
ctcggtctggtgcgaactaa

SEQ ID NO: 6098205 - DNA, 20 bp, Homo sapien
ttagttcgcaccagaccgag

SEQ ID NO: 6098206 - DNA, 20 bp, Homo sapien
ctccgtaatcgtggtcgaga

SEQ ID NO: 6098207 - DNA, 20 bp, Homo sapien
tctcgaccacgattacggag

SEQ ID NO: 6098208 - DNA, 20 bp, Homo sapien
cgtcggattagaccggatca

SEQ ID NO: 6098209 - DNA, 20 bp, Homo sapien
tgatccggtctaatccgacg

SEQ ID NO: 6098210 - DNA, 20 bp, Homo sapien
cggatgccttaaccgtctga

SEQ ID NO: 6098211 - DNA, 20 bp, Homo sapien
tcagacggttaaggcatccg

SEQ ID NO: 6098212 - DNA, 20 bp, Homo sapien
cggacgcttaatcgcctgta

SEQ ID NO: 6098213 - DNA, 20 bp, Homo sapien
tacaggcgattaagcgtccg

SEQ ID NO: 6098214 - DNA, 20 bp, Homo sapien
cgccttagacacgtcgtaga

SEQ ID NO: 6098215 - DNA, 20 bp, Homo sapien
tctacgacgtgtctaaggcg

SEQ ID NO: 6098216 - DNA, 20 bp, Homo sapien
cctgggtatcgtgagactaa

SEQ ID NO: 6098217 - DNA, 20 bp, Homo sapien
ttagtctcacgatacccagg

SEQ ID NO: 6098218 - DNA, 20 bp, Homo sapien
cctctgggcatccgtattaa

SEQ ID NO: 6098219 - DNA, 20 bp, Homo sapien
ttaatacggatgcccagagg

SEQ ID NO: 6098220 - DNA, 20 bp, Homo sapien
atctgagagctagtcggcat

SEQ ID NO: 6098221 - DNA, 20 bp, Homo sapien
atgccgactagctctcagat

SEQ ID NO: 6098222 - DNA, 20 bp, Homo sapien
cctcgatgtaggcggtcaaa

SEQ ID NO: 6098223 - DNA, 20 bp, Homo sapien
tttgaccgcctacatcgagg

SEQ ID NO: 6098224 - DNA, 20 bp, Homo sapien
cctatccgtctacgtgaata

SEQ ID NO: 6098225 - DNA, 20 bp, Homo sapien
tattcacgtagacggatagg

SEQ ID NO: 6098226 - DNA, 20 bp, Homo sapien
ccgggctgtccacgataata

SEQ ID NO: 6098227 - DNA, 20 bp, Homo sapien
tattatcgtggacagcccgg

SEQ ID NO: 6098228 - DNA, 20 bp, Homo sapien
ccgcgtagtgatcggtctaa

SEQ ID NO: 6098229 - DNA, 20 bp, Homo sapien
ttagaccgatcactacgcgg

SEQ ID NO: 6098230 - DNA, 20 bp, Homo sapien
ccacgagctgtaatccggta

SEQ ID NO: 6098231 - DNA, 20 bp, Homo sapien
taccggattacagctcgtgg

SEQ ID NO: 6098232 - DNA, 20 bp, Homo sapien
catccgtctggactagggaa

SEQ ID NO: 6098233 - DNA, 20 bp, Homo sapien
ttccctagtccagacggatg

SEQ ID NO: 6098234 - DNA, 20 bp, Homo sapien
cagaccgggatggataccaa

SEQ ID NO: 6098235 - DNA, 20 bp, Homo sapien
ttggtatccatcccggtctg

SEQ ID NO: 6098236 - DNA, 20 bp, Homo sapien
caaggcgtgctacggtctaa

SEQ ID NO: 6098237 - DNA, 20 bp, Homo sapien
ttagaccgtagcacgccttg

SEQ ID NO: 6098238 - DNA, 20 bp, Homo sapien
atccggcctggacgacaata

SEQ ID NO: 6098239 - DNA, 20 bp, Homo sapien
tattgtcgtccaggccggat

SEQ ID NO: 6098240 - DNA, 20 bp, Homo sapien
agtcgggatagcgtcctaca

SEQ ID NO: 6098241 - DNA, 20 bp, Homo sapien
tgtaggacgctatcccgact

SEQ ID NO: 6098242 - DNA, 20 bp, Homo sapien
agcaggactgagcgaccatt

SEQ ID NO: 6098243 - DNA, 20 bp, Homo sapien
aatggtcgctcagtcctgct

SEQ ID NO: 6098244 - DNA, 20 bp, Homo sapien
agtagtgcgaaaggctccta

SEQ ID NO: 6098245 - DNA, 20 bp, Homo sapien
taggagcctttcgcactact

SEQ ID NO: 6098246 - DNA, 20 bp, Homo sapien
aggtacgctcctagtccata

SEQ ID NO: 6098247 - DNA, 20 bp, Homo sapien
tatggactaggagcgtacct

SEQ ID NO: 6098248 - DNA, 20 bp, Homo sapien
agcacccgtctagcgaagta

SEQ ID NO: 6098249 - DNA, 20 bp, Homo sapien
tacttcgctagacgggtgct

SEQ ID NO: 6098250 - DNA, 20 bp, Homo sapien
agaatagctggtcccgccaa

SEQ ID NO: 6098251 - DNA, 20 bp, Homo sapien
ttggcgggaccagctattct

SEQ ID NO: 6098252 - DNA, 20 bp, Homo sapien
acccgtgagagcggatcaaa

SEQ ID NO: 6098253 - DNA, 20 bp, Homo sapien
tttgatccgctctcacgggt

SEQ ID NO: 6098254 - DNA, 20 bp, Homo sapien
acccgatgtcaacgcgagta

SEQ ID NO: 6098255 - DNA, 20 bp, Homo sapien
tactcgcgttgacatcgggt

SEQ ID NO: 6098256 - DNA, 20 bp, Homo sapien
accacagatcgaaggtcgga

SEQ ID NO: 6098257 - DNA, 20 bp, Homo sapien
tccgaccttcgatctgtggt

SEQ ID NO: 6098258 - DNA, 20 bp, Homo sapien
accaatcgtccatactagga

SEQ ID NO: 6098259 - DNA, 20 bp, Homo sapien
tcctagtatggacgattggt

SEQ ID NO: 6098260 - DNA, 20 bp, Homo sapien
acaggtgccacggcgttata

SEQ ID NO: 6098261 - DNA, 20 bp, Homo sapien
tataacgccgtggcacctgt

SEQ ID NO: 6098262 - DNA, 20 bp, Homo sapien
acagcgggtcgagtacacaa

SEQ ID NO: 6098263 - DNA, 20 bp, Homo sapien
ttgtgtactcgacccgctgt

SEQ ID NO: 6098264 - DNA, 20 bp, Homo sapien
tcgccgttggtctgtatgca

SEQ ID NO: 6098265 - DNA, 20 bp, Homo sapien
tgcatacagaccaacggcga

SEQ ID NO: 6098266 - DNA, 20 bp, Homo sapien
acacaccctagcgggataga

SEQ ID NO: 6098267 - DNA, 20 bp, Homo sapien
tctatcccgctagggtgtgt

SEQ ID NO: 6098268 - DNA, 20 bp, Homo sapien
aagtcggctagacggctata

SEQ ID NO: 6098269 - DNA, 20 bp, Homo sapien
tatagccgtctagccgactt

SEQ ID NO: 6098270 - DNA, 20 bp, Homo sapien
aagcatctccagacggttaa

SEQ ID NO: 6098271 - DNA, 20 bp, Homo sapien
ttaaccgtctggagatgctt

SEQ ID NO: 6098272 - DNA, 20 bp, Homo sapien
aaccgctcgacgcaagagta

SEQ ID NO: 6098273 - DNA, 20 bp, Homo sapien
tactcttgcgtcgagcggtt

SEQ ID NO: 6098274 - DNA, 20 bp, Homo sapien
aaattcgccacctagatcga

SEQ ID NO: 6098275 - DNA, 20 bp, Homo sapien
tcgatctaggtggcgaattt

SEQ ID NO: 6098276 - DNA, 20 bp, Homo sapien
aaatagcgtcacgagtccga

SEQ ID NO: 6098277 - DNA, 20 bp, Homo sapien
tcggactcgtgacgctattt

SEQ ID NO: 6098278 - DNA, 20 bp, Homo sapien
gtaggcggttcgtctcactt

SEQ ID NO: 6098279 - DNA, 20 bp, Homo sapien
aagtgagacgaaccgcctac

SEQ ID NO: 6098280 - DNA, 20 bp, Homo sapien
gggtctagttcgctacgtct

SEQ ID NO: 6098281 - DNA, 20 bp, Homo sapien
agacgtagcgaactagaccc

SEQ ID NO: 6098282 - DNA, 20 bp, Homo sapien
gggtagcttcgtacacattt

SEQ ID NO: 6098283 - DNA, 20 bp, Homo sapien
aaatgtgtacgaagctaccc

SEQ ID NO: 6098284 - DNA, 20 bp, Homo sapien
gggctcggttgacctctatt

SEQ ID NO: 6098285 - DNA, 20 bp, Homo sapien
aatagaggtcaaccgagccc

SEQ ID NO: 6098286 - DNA, 20 bp, Homo sapien
tatacgtgttgcgcgttagc

SEQ ID NO: 6098287 - DNA, 20 bp, Homo sapien
gctaacgcgcaacacgtata

SEQ ID NO: 6098288 - DNA, 20 bp, Homo sapien
gggccttattccggtgctat

SEQ ID NO: 6098289 - DNA, 20 bp, Homo sapien
atagcaccggaataaggccc

SEQ ID NO: 6098290 - DNA, 20 bp, Homo sapien
gggcacgttgctaaactgtt

SEQ ID NO: 6098291 - DNA, 20 bp, Homo sapien
aacagtttagcaacgtgccc

SEQ ID NO: 6098292 - DNA, 20 bp, Homo sapien
ggcgtcccttgaagtcgtat

SEQ ID NO: 6098293 - DNA, 20 bp, Homo sapien
atacgacttcaagggacgcc

SEQ ID NO: 6098294 - DNA, 20 bp, Homo sapien
ggcccgagttgcgaaacatt

SEQ ID NO: 6098295 - DNA, 20 bp, Homo sapien
aatgtttcgcaactcgggcc

SEQ ID NO: 6098296 - DNA, 20 bp, Homo sapien
ggatggcgttccgtcctatt

SEQ ID NO: 6098297 - DNA, 20 bp, Homo sapien
aataggacggaacgccatcc

SEQ ID NO: 6098298 - DNA, 20 bp, Homo sapien
gcgtcgccttccgagttatt

SEQ ID NO: 6098299 - DNA, 20 bp, Homo sapien
aataactcggaaggcgacgc

SEQ ID NO: 6098300 - DNA, 20 bp, Homo sapien
gcggtaggttcccgacatat

SEQ ID NO: 6098301 - DNA, 20 bp, Homo sapien
atatgtcgggaacctaccgc

SEQ ID NO: 6098302 - DNA, 20 bp, Homo sapien
gcggctggttacccgtatat

SEQ ID NO: 6098303 - DNA, 20 bp, Homo sapien
atatacgggtaaccagccgc

SEQ ID NO: 6098304 - DNA, 20 bp, Homo sapien
gaggtccgttactctcgtgt

SEQ ID NO: 6098305 - DNA, 20 bp, Homo sapien
acacgagagtaacggacctc

SEQ ID NO: 6098306 - DNA, 20 bp, Homo sapien
gagacaaattaccgcgtcgt

SEQ ID NO: 6098307 - DNA, 20 bp, Homo sapien
acgacgcggtaatttgtctc

SEQ ID NO: 6098308 - DNA, 20 bp, Homo sapien
gccatagcttcgacacgatt

SEQ ID NO: 6098309 - DNA, 20 bp, Homo sapien
aatcgtgtcgaagctatggc

SEQ ID NO: 6098310 - DNA, 20 bp, Homo sapien
gacgaacctggtcggtcaat

SEQ ID NO: 6098311 - DNA, 20 bp, Homo sapien
attgaccgaccaggttcgtc

SEQ ID NO: 6098312 - DNA, 20 bp, Homo sapien
gacccggttcaagactctgt

SEQ ID NO: 6098313 - DNA, 20 bp, Homo sapien
acagagtcttgaaccgggtc

SEQ ID NO: 6098314 - DNA, 20 bp, Homo sapien
gacccacgttcaacatagtt

SEQ ID NO: 6098315 - DNA, 20 bp, Homo sapien
aactatgttgaacgtgggtc

SEQ ID NO: 6098316 - DNA, 20 bp, Homo sapien
gaagcgggttacgcatcctt

SEQ ID NO: 6098317 - DNA, 20 bp, Homo sapien
aaggatgcgtaacccgcttc

SEQ ID NO: 6098318 - DNA, 20 bp, Homo sapien
ctggcccgttagtgaagtct

SEQ ID NO: 6098319 - DNA, 20 bp, Homo sapien
agacttcactaacgggccag

SEQ ID NO: 6098320 - DNA, 20 bp, Homo sapien
ctcaaccttacgctaatggt

SEQ ID NO: 6098321 - DNA, 20 bp, Homo sapien
accattagcgtaaggttgag

SEQ ID NO: 6098322 - DNA, 20 bp, Homo sapien
ctagacggttacggcgctat

SEQ ID NO: 6098323 - DNA, 20 bp, Homo sapien
atagcgccgtaaccgtctag

SEQ ID NO: 6098324 - DNA, 20 bp, Homo sapien
ctaatatagggtgggtccat

SEQ ID NO: 6098325 - DNA, 20 bp, Homo sapien
atggacccaccctatattag

SEQ ID NO: 6098326 - DNA, 20 bp, Homo sapien
cggtccgattacctatcatt

SEQ ID NO: 6098327 - DNA, 20 bp, Homo sapien
aatgataggtaatcggaccg

SEQ ID NO: 6098328 - DNA, 20 bp, Homo sapien
cggtatcctcgtcgctaaat

SEQ ID NO: 6098329 - DNA, 20 bp, Homo sapien
atttagcgacgaggataccg

SEQ ID NO: 6098330 - DNA, 20 bp, Homo sapien
gatactaattcagcatcggg

SEQ ID NO: 6098331 - DNA, 20 bp, Homo sapien
cccgatgctgaattagtatc

SEQ ID NO: 6098332 - DNA, 20 bp, Homo sapien
cggctccgtggtacgaatat

SEQ ID NO: 6098333 - DNA, 20 bp, Homo sapien
atattcgtaccacggagccg

SEQ ID NO: 6098334 - DNA, 20 bp, Homo sapien
cgctaattcaccaacgtagt

SEQ ID NO: 6098335 - DNA, 20 bp, Homo sapien
actacgttggtgaattagcg

SEQ ID NO: 6098336 - DNA, 20 bp, Homo sapien
cgcgtccctctaggtatagt

SEQ ID NO: 6098337 - DNA, 20 bp, Homo sapien
actatacctagagggacgcg

SEQ ID NO: 6098338 - DNA, 20 bp, Homo sapien
cgcccgtgtggagactaaat

SEQ ID NO: 6098339 - DNA, 20 bp, Homo sapien
atttagtctccacacgggcg

SEQ ID NO: 6098340 - DNA, 20 bp, Homo sapien
cgaggacgttacacgcctat

SEQ ID NO: 6098341 - DNA, 20 bp, Homo sapien
ataggcgtgtaacgtcctcg

SEQ ID NO: 6098342 - DNA, 20 bp, Homo sapien
cgactacgtgctccggtaat

SEQ ID NO: 6098343 - DNA, 20 bp, Homo sapien
attaccggagcacgtagtcg

SEQ ID NO: 6098344 - DNA, 20 bp, Homo sapien
cctaacggtgctgagtgttt

SEQ ID NO: 6098345 - DNA, 20 bp, Homo sapien
aaacactcagcaccgttagg

SEQ ID NO: 6098346 - DNA, 20 bp, Homo sapien
ccgttagacaagtgctggtt

SEQ ID NO: 6098347 - DNA, 20 bp, Homo sapien
aaccagcacttgtctaacgg

SEQ ID NO: 6098348 - DNA, 20 bp, Homo sapien
ccggaacctgatggcgaatt

SEQ ID NO: 6098349 - DNA, 20 bp, Homo sapien
aattcgccatcaggttccgg

SEQ ID NO: 6098350 - DNA, 20 bp, Homo sapien
cccaattagggacggtgcat

SEQ ID NO: 6098351 - DNA, 20 bp, Homo sapien
atgcaccgtccctaattggg

SEQ ID NO: 6098352 - DNA, 20 bp, Homo sapien
gacgagactgtgcgctcata

SEQ ID NO: 6098353 - DNA, 20 bp, Homo sapien
tatgagcgcacagtctcgtc

SEQ ID NO: 6098354 - DNA, 20 bp, Homo sapien
ccaacgcggtccagtagaat

SEQ ID NO: 6098355 - DNA, 20 bp, Homo sapien
attctactggaccgcgttgg

SEQ ID NO: 6098356 - DNA, 20 bp, Homo sapien
catactcctgtaaccgtagt

SEQ ID NO: 6098357 - DNA, 20 bp, Homo sapien
actacggttacaggagtatg

SEQ ID NO: 6098358 - DNA, 20 bp, Homo sapien
cacctccgtgacgtagtatt

SEQ ID NO: 6098359 - DNA, 20 bp, Homo sapien
aatactacgtcacggaggtg

SEQ ID NO: 6098360 - DNA, 20 bp, Homo sapien
attccgtcacctcgggagat

SEQ ID NO: 6098361 - DNA, 20 bp, Homo sapien
atctcccgaggtgacggaat

SEQ ID NO: 6098362 - DNA, 20 bp, Homo sapien
atgtcgtcacgtcccggaat

SEQ ID NO: 6098363 - DNA, 20 bp, Homo sapien
attccgggacgtgacgacat

SEQ ID NO: 6098364 - DNA, 20 bp, Homo sapien
atacgcattacccacaaggt

SEQ ID NO: 6098365 - DNA, 20 bp, Homo sapien
accttgtgggtaatgcgtat

SEQ ID NO: 6098366 - DNA, 20 bp, Homo sapien
agtcccgatgagctaacctt

SEQ ID NO: 6098367 - DNA, 20 bp, Homo sapien
aaggttagctcatcgggact

SEQ ID NO: 6098368 - DNA, 20 bp, Homo sapien
agatcgtcgaaagtatcggt

SEQ ID NO: 6098369 - DNA, 20 bp, Homo sapien
accgatactttcgacgatct

SEQ ID NO: 6098370 - DNA, 20 bp, Homo sapien
acgtcgcctcacggagtaat

SEQ ID NO: 6098371 - DNA, 20 bp, Homo sapien
attactccgtgaggcgacgt

SEQ ID NO: 6098372 - DNA, 20 bp, Homo sapien
acgaacctgaggccgctaat

SEQ ID NO: 6098373 - DNA, 20 bp, Homo sapien
attagcggcctcaggttcgt

SEQ ID NO: 6098374 - DNA, 20 bp, Homo sapien
gacgaacttcagcagagtgc

SEQ ID NO: 6098375 - DNA, 20 bp, Homo sapien
gcactctgctgaagttcgtc

SEQ ID NO: 6098376 - DNA, 20 bp, Homo sapien
tatcgtcattgcgtatcagg

SEQ ID NO: 6098377 - DNA, 20 bp, Homo sapien
cctgatacgcaatgacgata

SEQ ID NO: 6098378 - DNA, 20 bp, Homo sapien
acctcccgtcagagagtatt

SEQ ID NO: 6098379 - DNA, 20 bp, Homo sapien
aatactctctgacgggaggt

SEQ ID NO: 6098380 - DNA, 20 bp, Homo sapien
accgtctagccacataagtt

SEQ ID NO: 6098381 - DNA, 20 bp, Homo sapien
aacttatgtggctagacggt

SEQ ID NO: 6098382 - DNA, 20 bp, Homo sapien
acccgcgatgaccgagaatt

SEQ ID NO: 6098383 - DNA, 20 bp, Homo sapien
aattctcggtcatcgcgggt

SEQ ID NO: 6098384 - DNA, 20 bp, Homo sapien
accacgtatcgacgctaggt

SEQ ID NO: 6098385 - DNA, 20 bp, Homo sapien
acctagcgtcgatacgtggt

SEQ ID NO: 6098386 - DNA, 20 bp, Homo sapien
acactcgggaaccgtgcaat

SEQ ID NO: 6098387 - DNA, 20 bp, Homo sapien
attgcacggttcccgagtgt

SEQ ID NO: 6098388 - DNA, 20 bp, Homo sapien
acaccggctctacggaagat

SEQ ID NO: 6098389 - DNA, 20 bp, Homo sapien
atcttccgtagagccggtgt

SEQ ID NO: 6098390 - DNA, 20 bp, Homo sapien
aattatcggaactcgtcgct

SEQ ID NO: 6098391 - DNA, 20 bp, Homo sapien
agcgacgagttccgataatt

SEQ ID NO: 6098392 - DNA, 20 bp, Homo sapien
aatcaccctatacgcgaggt

SEQ ID NO: 6098393 - DNA, 20 bp, Homo sapien
acctcgcgtatagggtgatt

SEQ ID NO: 6098394 - DNA, 20 bp, Homo sapien
aacatagtgacacgacgggt

SEQ ID NO: 6098395 - DNA, 20 bp, Homo sapien
acccgtcgtgtcactatgtt

SEQ ID NO: 6098396 - DNA, 20 bp, Homo sapien
aacaacgatgagaccgggct

SEQ ID NO: 6098397 - DNA, 20 bp, Homo sapien
agcccggtctcatcgttgtt

SEQ ID NO: 6098398 - DNA, 20 bp, Homo sapien
ctgtagctgctgtccggtat

SEQ ID NO: 6098399 - DNA, 20 bp, Homo sapien
ataccggacagcagctacag

SEQ ID NO: 6098400 - DNA, 20 bp, Homo sapien
ttgcgctctttggtaaacgg

SEQ ID NO: 6098401 - DNA, 20 bp, Homo sapien
ccgtttaccaaagagcgcaa

SEQ ID NO: 6098402 - DNA, 20 bp, Homo sapien
ttactgtatttcacgacggg

SEQ ID NO: 6098403 - DNA, 20 bp, Homo sapien
cccgtcgtgaaatacagtaa

SEQ ID NO: 6098404 - DNA, 20 bp, Homo sapien
tgtaaccgtttcgcttgagg

SEQ ID NO: 6098405 - DNA, 20 bp, Homo sapien
cctcaagcgaaacggttaca

SEQ ID NO: 6098406 - DNA, 20 bp, Homo sapien
tcttatttaatgacgggccg

SEQ ID NO: 6098407 - DNA, 20 bp, Homo sapien
cggcccgtcattaaataaga

SEQ ID NO: 6098408 - DNA, 20 bp, Homo sapien
tctcgtattgtagtaccggg

SEQ ID NO: 6098409 - DNA, 20 bp, Homo sapien
cccggtactacaatacgaga

SEQ ID NO: 6098410 - DNA, 20 bp, Homo sapien
tcgatacgtttaatctccgg

SEQ ID NO: 6098411 - DNA, 20 bp, Homo sapien
ccggagattaaacgtatcga

SEQ ID NO: 6098412 - DNA, 20 bp, Homo sapien
tcgaccgatttaccttatgg

SEQ ID NO: 6098413 - DNA, 20 bp, Homo sapien
ccataaggtaaatcggtcga

SEQ ID NO: 6098414 - DNA, 20 bp, Homo sapien
tccaggtctttaacgacgtg

SEQ ID NO: 6098415 - DNA, 20 bp, Homo sapien
cacgtcgttaaagacctgga

SEQ ID NO: 6098416 - DNA, 20 bp, Homo sapien
tagtacacttggataaccgg

SEQ ID NO: 6098417 - DNA, 20 bp, Homo sapien
ccggttatccaagtgtacta

SEQ ID NO: 6098418 - DNA, 20 bp, Homo sapien
taaatccgttcttcgcgtgg

SEQ ID NO: 6098419 - DNA, 20 bp, Homo sapien
ccacgcgaagaacggattta

SEQ ID NO: 6098420 - DNA, 20 bp, Homo sapien
ctgtagcatggtgacgcatc

SEQ ID NO: 6098421 - DNA, 20 bp, Homo sapien
gatgcgtcaccatgctacag

SEQ ID NO: 6098422 - DNA, 20 bp, Homo sapien
gttctcattgacgttccggg

SEQ ID NO: 6098423 - DNA, 20 bp, Homo sapien
cccggaacgtcaatgagaac

SEQ ID NO: 6098424 - DNA, 20 bp, Homo sapien
gtcacccgttctattctaag

SEQ ID NO: 6098425 - DNA, 20 bp, Homo sapien
cttagaatagaacgggtgac

SEQ ID NO: 6098426 - DNA, 20 bp, Homo sapien
ggttatcattcattacccgg

SEQ ID NO: 6098427 - DNA, 20 bp, Homo sapien
ccgggtaatgaatgataacc

SEQ ID NO: 6098428 - DNA, 20 bp, Homo sapien
ggtcgatattcgtataacgg

SEQ ID NO: 6098429 - DNA, 20 bp, Homo sapien
ccgttatacgaatatcgacc

SEQ ID NO: 6098430 - DNA, 20 bp, Homo sapien
ggaacttattatagagccgg

SEQ ID NO: 6098431 - DNA, 20 bp, Homo sapien
ccggctctataataagttcc

SEQ ID NO: 6098432 - DNA, 20 bp, Homo sapien
gctactcttaggttataggg

SEQ ID NO: 6098433 - DNA, 20 bp, Homo sapien
ccctataacctaagagtagc

SEQ ID NO: 6098434 - DNA, 20 bp, Homo sapien
cgtctcagttaatagtacgg

SEQ ID NO: 6098435 - DNA, 20 bp, Homo sapien
ccgtactattaactgagacg

SEQ ID NO: 6098436 - DNA, 20 bp, Homo sapien
cgtccacgttactaagatgg

SEQ ID NO: 6098437 - DNA, 20 bp, Homo sapien
ccatcttagtaacgtggacg

SEQ ID NO: 6098438 - DNA, 20 bp, Homo sapien
cctgattaaacgtagtgcgg

SEQ ID NO: 6098439 - DNA, 20 bp, Homo sapien
ccgcactacgtttaatcagg

SEQ ID NO: 6098440 - DNA, 20 bp, Homo sapien
catcgtacttaaccacgtag

SEQ ID NO: 6098441 - DNA, 20 bp, Homo sapien
ctacgtggttaagtacgatg

SEQ ID NO: 6098442 - DNA, 20 bp, Homo sapien
cacgctgctcgaacagtgat

SEQ ID NO: 6098443 - DNA, 20 bp, Homo sapien
atcactgttcgagcagcgtg

SEQ ID NO: 6098444 - DNA, 20 bp, Homo sapien
atttgatcgtaactcgggtg

SEQ ID NO: 6098445 - DNA, 20 bp, Homo sapien
cacccgagttacgatcaaat

SEQ ID NO: 6098446 - DNA, 20 bp, Homo sapien
attcgggctagtcgtacctg

SEQ ID NO: 6098447 - DNA, 20 bp, Homo sapien
caggtacgactagcccgaat

SEQ ID NO: 6098448 - DNA, 20 bp, Homo sapien
attaagcgacgttggtctag

SEQ ID NO: 6098449 - DNA, 20 bp, Homo sapien
ctagaccaacgtcgcttaat

SEQ ID NO: 6098450 - DNA, 20 bp, Homo sapien
atagtatagtagactccggg

SEQ ID NO: 6098451 - DNA, 20 bp, Homo sapien
cccggagtctactatactat

SEQ ID NO: 6098452 - DNA, 20 bp, Homo sapien
agtaatatgagactaccggg

SEQ ID NO: 6098453 - DNA, 20 bp, Homo sapien
cccggtagtctcatattact

SEQ ID NO: 6098454 - DNA, 20 bp, Homo sapien
acggactatggaacctactg

SEQ ID NO: 6098455 - DNA, 20 bp, Homo sapien
cagtaggttccatagtccgt

SEQ ID NO: 6098456 - DNA, 20 bp, Homo sapien
acaactaggtacaggtatcg

SEQ ID NO: 6098457 - DNA, 20 bp, Homo sapien
cgatacctgtacctagttgt

SEQ ID NO: 6098458 - DNA, 20 bp, Homo sapien
aagctccgtacacctagagg

SEQ ID NO: 6098459 - DNA, 20 bp, Homo sapien
cctctaggtgtacggagctt

SEQ ID NO: 6098460 - DNA, 20 bp, Homo sapien
aacctgataacccatagcgg

SEQ ID NO: 6098461 - DNA, 20 bp, Homo sapien
ccgctatgggttatcaggtt

SEQ ID NO: 6098462 - DNA, 20 bp, Homo sapien
aacagtctaacctacgcgag

SEQ ID NO: 6098463 - DNA, 20 bp, Homo sapien
ctcgcgtaggttagactgtt

SEQ ID NO: 6098464 - DNA, 20 bp, Homo sapien
cacgctgatgcacgtagtga

SEQ ID NO: 6098465 - DNA, 20 bp, Homo sapien
tcactacgtgcatcagcgtg

SEQ ID NO: 6098466 - DNA, 20 bp, Homo sapien
aaattatagcaacgggctcg

SEQ ID NO: 6098467 - DNA, 20 bp, Homo sapien
cgagcccgttgctataattt

SEQ ID NO: 6098468 - DNA, 20 bp, Homo sapien
tgttatggtttacgcggccc

SEQ ID NO: 6098469 - DNA, 20 bp, Homo sapien
gggccgcgtaaaccataaca

SEQ ID NO: 6098470 - DNA, 20 bp, Homo sapien
tgttaaagtttcggactggc

SEQ ID NO: 6098471 - DNA, 20 bp, Homo sapien
gccagtccgaaactttaaca

SEQ ID NO: 6098472 - DNA, 20 bp, Homo sapien
tctggttattcgtgggaccc

SEQ ID NO: 6098473 - DNA, 20 bp, Homo sapien
gggtcccacgaataaccaga

SEQ ID NO: 6098474 - DNA, 20 bp, Homo sapien
tcgtagtattgggttcgacc

SEQ ID NO: 6098475 - DNA, 20 bp, Homo sapien
ggtcgaacccaatactacga

SEQ ID NO: 6098476 - DNA, 20 bp, Homo sapien
cgataccttaataacagggc

SEQ ID NO: 6098477 - DNA, 20 bp, Homo sapien
gccctgttattaaggtatcg

SEQ ID NO: 6098478 - DNA, 20 bp, Homo sapien
aacaagagtcgaacgccgtc

SEQ ID NO: 6098479 - DNA, 20 bp, Homo sapien
gacggcgttcgactcttgtt

SEQ ID NO: 6098480 - DNA, 20 bp, Homo sapien
ttgtcgggtttggcctacca

SEQ ID NO: 6098481 - DNA, 20 bp, Homo sapien
tggtaggccaaacccgacaa

SEQ ID NO: 6098482 - DNA, 20 bp, Homo sapien
ggcgatgttcgtaaccctta

SEQ ID NO: 6098483 - DNA, 20 bp, Homo sapien
taagggttacgaacatcgcc

SEQ ID NO: 6098484 - DNA, 20 bp, Homo sapien
ctcgccgttactactaggta

SEQ ID NO: 6098485 - DNA, 20 bp, Homo sapien
tacctagtagtaacggcgag

SEQ ID NO: 6098486 - DNA, 20 bp, Homo sapien
atctcgtagactgcgatact

SEQ ID NO: 6098487 - DNA, 20 bp, Homo sapien
agtatcgcagtctacgagat

SEQ ID NO: 6098488 - DNA, 20 bp, Homo sapien
cgggacgcttactttctgta

SEQ ID NO: 6098489 - DNA, 20 bp, Homo sapien
tacagaaagtaagcgtcccg

SEQ ID NO: 6098490 - DNA, 20 bp, Homo sapien
cggcccgttacgcaagtata

SEQ ID NO: 6098491 - DNA, 20 bp, Homo sapien
tatacttgcgtaacgggccg

SEQ ID NO: 6098492 - DNA, 20 bp, Homo sapien
cgcccgcgtggtaagtaata

SEQ ID NO: 6098493 - DNA, 20 bp, Homo sapien
tattacttaccacgcgggcg

SEQ ID NO: 6098494 - DNA, 20 bp, Homo sapien
ccgtcccgtggagtcaaata

SEQ ID NO: 6098495 - DNA, 20 bp, Homo sapien
tatttgactccacgggacgg

SEQ ID NO: 6098496 - DNA, 20 bp, Homo sapien
caattcggaaggtgccgtta

SEQ ID NO: 6098497 - DNA, 20 bp, Homo sapien
taacggcaccttccgaattg

SEQ ID NO: 6098498 - DNA, 20 bp, Homo sapien
attccggctcctcgaaagta

SEQ ID NO: 6098499 - DNA, 20 bp, Homo sapien
tactttcgaggagccggaat

SEQ ID NO: 6098500 - DNA, 20 bp, Homo sapien
agggtacgtggactcaccta

SEQ ID NO: 6098501 - DNA, 20 bp, Homo sapien
taggtgagtccacgtaccct

SEQ ID NO: 6098502 - DNA, 20 bp, Homo sapien
acgggtcgtccagcctaata

SEQ ID NO: 6098503 - DNA, 20 bp, Homo sapien
tattaggctggacgacccgt

SEQ ID NO: 6098504 - DNA, 20 bp, Homo sapien
accgtagtgacgacgcctta

SEQ ID NO: 6098505 - DNA, 20 bp, Homo sapien
taaggcgtcgtcactacggt

SEQ ID NO: 6098506 - DNA, 20 bp, Homo sapien
tccgtaggtttacataccgt

SEQ ID NO: 6098507 - DNA, 20 bp, Homo sapien
acggtatgtaaacctacgga

SEQ ID NO: 6098508 - DNA, 20 bp, Homo sapien
agcagcatcgtagagcgtca

SEQ ID NO: 6098509 - DNA, 20 bp, Homo sapien
tgacgctctacgatgctgct

SEQ ID NO: 6098510 - DNA, 20 bp, Homo sapien
gggtcccgttcgctagtatt

SEQ ID NO: 6098511 - DNA, 20 bp, Homo sapien
aatactagcgaacgggaccc

SEQ ID NO: 6098512 - DNA, 20 bp, Homo sapien
gggcgtcgttgaccctaatt

SEQ ID NO: 6098513 - DNA, 20 bp, Homo sapien
aattagggtcaacgacgccc

SEQ ID NO: 6098514 - DNA, 20 bp, Homo sapien
ggatcgggttccgtaatctt

SEQ ID NO: 6098515 - DNA, 20 bp, Homo sapien
aagattacggaacccgatcc

SEQ ID NO: 6098516 - DNA, 20 bp, Homo sapien
gcttacggttccggtcgatt

SEQ ID NO: 6098517 - DNA, 20 bp, Homo sapien
aatcgaccggaaccgtaagc

SEQ ID NO: 6098518 - DNA, 20 bp, Homo sapien
gcctacggttcccgaagtat

SEQ ID NO: 6098519 - DNA, 20 bp, Homo sapien
atacttcgggaaccgtaggc

SEQ ID NO: 6098520 - DNA, 20 bp, Homo sapien
ctctacggttagccggtatt

SEQ ID NO: 6098521 - DNA, 20 bp, Homo sapien
aataccggctaaccgtagag

SEQ ID NO: 6098522 - DNA, 20 bp, Homo sapien
ctaccaagttacggacctgt

SEQ ID NO: 6098523 - DNA, 20 bp, Homo sapien
acaggtccgtaacttggtag

SEQ ID NO: 6098524 - DNA, 20 bp, Homo sapien
ctacaagttacgaccggctt

SEQ ID NO: 6098525 - DNA, 20 bp, Homo sapien
aagccggtcgtaacttgtag

SEQ ID NO: 6098526 - DNA, 20 bp, Homo sapien
cgacctcgttaaactatggt

SEQ ID NO: 6098527 - DNA, 20 bp, Homo sapien
accatagtttaacgaggtcg

SEQ ID NO: 6098528 - DNA, 20 bp, Homo sapien
accaacgtgaacctagcttt

SEQ ID NO: 6098529 - DNA, 20 bp, Homo sapien
aaagctaggttcacgttggt

SEQ ID NO: 6098530 - DNA, 20 bp, Homo sapien
aactagcgtatcgcagactg

SEQ ID NO: 6098531 - DNA, 20 bp, Homo sapien
cagtctgcgatacgctagtt

SEQ ID NO: 6098532 - DNA, 20 bp, Homo sapien
aagtcccgtaactcgcattt

SEQ ID NO: 6098533 - DNA, 20 bp, Homo sapien
aaatgcgagttacgggactt

SEQ ID NO: 6098534 - DNA, 20 bp, Homo sapien
aacggtgtcaacccggtcat

SEQ ID NO: 6098535 - DNA, 20 bp, Homo sapien
atgaccgggttgacaccgtt

SEQ ID NO: 6098536 - DNA, 20 bp, Homo sapien
aacgccctcgacggagaatt

SEQ ID NO: 6098537 - DNA, 20 bp, Homo sapien
aattctccgtcgagggcgtt

SEQ ID NO: 6098538 - DNA, 20 bp, Homo sapien
aacgaactgaaccctgactt

SEQ ID NO: 6098539 - DNA, 20 bp, Homo sapien
aagtcagggttcagttcgtt

SEQ ID NO: 6098540 - DNA, 20 bp, Homo sapien
aaccaccctagcaaggaggt

SEQ ID NO: 6098541 - DNA, 20 bp, Homo sapien
acctccttgctagggtggtt

SEQ ID NO: 6098542 - DNA, 20 bp, Homo sapien
ttagtcggtttctacacccg

SEQ ID NO: 6098543 - DNA, 20 bp, Homo sapien
cgggtgtagaaaccgactaa

SEQ ID NO: 6098544 - DNA, 20 bp, Homo sapien
tggttacgtttatccgccgg

SEQ ID NO: 6098545 - DNA, 20 bp, Homo sapien
ccggcggataaacgtaacca

SEQ ID NO: 6098546 - DNA, 20 bp, Homo sapien
tcgtttaattgtgaacccgg

SEQ ID NO: 6098547 - DNA, 20 bp, Homo sapien
ccgggttcacaattaaacga

SEQ ID NO: 6098548 - DNA, 20 bp, Homo sapien
tattaaggttgtaccctcgg

SEQ ID NO: 6098549 - DNA, 20 bp, Homo sapien
ccgagggtacaaccttaata

SEQ ID NO: 6098550 - DNA, 20 bp, Homo sapien
gtaacgaattataccctcgg

SEQ ID NO: 6098551 - DNA, 20 bp, Homo sapien
ccgagggtataattcgttac

SEQ ID NO: 6098552 - DNA, 20 bp, Homo sapien
aactagcatctaagcactcg

SEQ ID NO: 6098553 - DNA, 20 bp, Homo sapien
cgagtgcttagatgctagtt

SEQ ID NO: 6098554 - DNA, 20 bp, Homo sapien
gaaattcgtaccacttaccg

SEQ ID NO: 6098555 - DNA, 20 bp, Homo sapien
cggtaagtggtacgaatttc

SEQ ID NO: 6098556 - DNA, 20 bp, Homo sapien
ctactcttacctataacggg

SEQ ID NO: 6098557 - DNA, 20 bp, Homo sapien
cccgttataggtaagagtag

SEQ ID NO: 6098558 - DNA, 20 bp, Homo sapien
ctacaaccttaccgtatagg

SEQ ID NO: 6098559 - DNA, 20 bp, Homo sapien
cctatacggtaaggttgtag

SEQ ID NO: 6098560 - DNA, 20 bp, Homo sapien
cctatacgttaaacatcggg

SEQ ID NO: 6098561 - DNA, 20 bp, Homo sapien
cccgatgtttaacgtatagg

SEQ ID NO: 6098562 - DNA, 20 bp, Homo sapien
atcacgtattaacgaacggg

SEQ ID NO: 6098563 - DNA, 20 bp, Homo sapien
cccgttcgttaatacgtgat

SEQ ID NO: 6098564 - DNA, 20 bp, Homo sapien
aaggtaatctacactacggg

SEQ ID NO: 6098565 - DNA, 20 bp, Homo sapien
cccgtagtgtagattacctt

SEQ ID NO: 6098566 - DNA, 20 bp, Homo sapien
aaatctactaactcccaggg

SEQ ID NO: 6098567 - DNA, 20 bp, Homo sapien
ccctgggagttagtagattt

SEQ ID NO: 6098568 - DNA, 20 bp, Homo sapien
aaacggatctaacggtctag

SEQ ID NO: 6098569 - DNA, 20 bp, Homo sapien
ctagaccgttagatccgttt

SEQ ID NO: 6098570 - DNA, 20 bp, Homo sapien
ttagtacgtgtttcaagcgg

SEQ ID NO: 6098571 - DNA, 20 bp, Homo sapien
ccgcttgaaacacgtactaa

SEQ ID NO: 6098572 - DNA, 20 bp, Homo sapien
tgtatgttgtggcgaatccc

SEQ ID NO: 6098573 - DNA, 20 bp, Homo sapien
gggattcgccacaacataca

SEQ ID NO: 6098574 - DNA, 20 bp, Homo sapien
tgctattattgtcgaggagc

SEQ ID NO: 6098575 - DNA, 20 bp, Homo sapien
gctcctcgacaataatagca

SEQ ID NO: 6098576 - DNA, 20 bp, Homo sapien
tctgtttgtaagtgcggccc

SEQ ID NO: 6098577 - DNA, 20 bp, Homo sapien
gggccgcacttacaaacaga

SEQ ID NO: 6098578 - DNA, 20 bp, Homo sapien
tcgcagtgtgtgttctgacc

SEQ ID NO: 6098579 - DNA, 20 bp, Homo sapien
ggtcagaacacacactgcga

SEQ ID NO: 6098580 - DNA, 20 bp, Homo sapien
tccttagattggtgcgcgtc

SEQ ID NO: 6098581 - DNA, 20 bp, Homo sapien
gacgcgcaccaatctaagga

SEQ ID NO: 6098582 - DNA, 20 bp, Homo sapien
tcctcgttggtagtacgtgc

SEQ ID NO: 6098583 - DNA, 20 bp, Homo sapien
gcacgtactaccaacgagga

SEQ ID NO: 6098584 - DNA, 20 bp, Homo sapien
tccacgcatgtttacgatac

SEQ ID NO: 6098585 - DNA, 20 bp, Homo sapien
gtatcgtaaacatgcgtgga

SEQ ID NO: 6098586 - DNA, 20 bp, Homo sapien
tcacgtagtgttctctgagc

SEQ ID NO: 6098587 - DNA, 20 bp, Homo sapien
gctcagagaacactacgtga

SEQ ID NO: 6098588 - DNA, 20 bp, Homo sapien
tcacggtatgttcgcgtatc

SEQ ID NO: 6098589 - DNA, 20 bp, Homo sapien
gatacgcgaacataccgtga

SEQ ID NO: 6098590 - DNA, 20 bp, Homo sapien
tatttccagtacggttggcg

SEQ ID NO: 6098591 - DNA, 20 bp, Homo sapien
cgccaaccgtactggaaata

SEQ ID NO: 6098592 - DNA, 20 bp, Homo sapien
tatttacgaaccttgggagc

SEQ ID NO: 6098593 - DNA, 20 bp, Homo sapien
gctcccaaggttcgtaaata

SEQ ID NO: 6098594 - DNA, 20 bp, Homo sapien
tatttaccatacttgcggcg

SEQ ID NO: 6098595 - DNA, 20 bp, Homo sapien
cgccgcaagtatggtaaata

SEQ ID NO: 6098596 - DNA, 20 bp, Homo sapien
gccagtgctgctgctctata

SEQ ID NO: 6098597 - DNA, 20 bp, Homo sapien
tatagagcagcagcactggc

SEQ ID NO: 6098598 - DNA, 20 bp, Homo sapien
gtgtcaccttctgcgtagtg

SEQ ID NO: 6098599 - DNA, 20 bp, Homo sapien
cactacgcagaaggtgacac

SEQ ID NO: 6098600 - DNA, 20 bp, Homo sapien
tattgccctgtcttcgacga

SEQ ID NO: 6098601 - DNA, 20 bp, Homo sapien
tcgtcgaagacagggcaata

SEQ ID NO: 6098602 - DNA, 20 bp, Homo sapien
tattcgtgttcgtcgcgcca

SEQ ID NO: 6098603 - DNA, 20 bp, Homo sapien
tggcgcgacgaacacgaata

SEQ ID NO: 6098604 - DNA, 20 bp, Homo sapien
tatcttgagttatcggcgag

SEQ ID NO: 6098605 - DNA, 20 bp, Homo sapien
ctcgccgataactcaagata

SEQ ID NO: 6098606 - DNA, 20 bp, Homo sapien
tatcgagttagttgctacgc

SEQ ID NO: 6098607 - DNA, 20 bp, Homo sapien
gcgtagcaactaactcgata

SEQ ID NO: 6098608 - DNA, 20 bp, Homo sapien
tatattagttctgaccgcgc

SEQ ID NO: 6098609 - DNA, 20 bp, Homo sapien
gcgcggtcagaactaatata

SEQ ID NO: 6098610 - DNA, 20 bp, Homo sapien
tagtttccaaccctgttcgg

SEQ ID NO: 6098611 - DNA, 20 bp, Homo sapien
ccgaacagggttggaaacta

SEQ ID NO: 6098612 - DNA, 20 bp, Homo sapien
tagttccgttggcggtcatc

SEQ ID NO: 6098613 - DNA, 20 bp, Homo sapien
gatgaccgccaacggaacta

SEQ ID NO: 6098614 - DNA, 20 bp, Homo sapien
tagcaacgtggtcttgatgt

SEQ ID NO: 6098615 - DNA, 20 bp, Homo sapien
acatcaagaccacgttgcta

SEQ ID NO: 6098616 - DNA, 20 bp, Homo sapien
tagaccgcttgtccacgtat

SEQ ID NO: 6098617 - DNA, 20 bp, Homo sapien
atacgtggacaagcggtcta

SEQ ID NO: 6098618 - DNA, 20 bp, Homo sapien
tactattgcatgtgtggacg

SEQ ID NO: 6098619 - DNA, 20 bp, Homo sapien
cgtccacacatgcaatagta

SEQ ID NO: 6098620 - DNA, 20 bp, Homo sapien
gactcattcagaaggtgtgc

SEQ ID NO: 6098621 - DNA, 20 bp, Homo sapien
gcacaccttctgaatgagtc

SEQ ID NO: 6098622 - DNA, 20 bp, Homo sapien
tacgagtgttcggtgctctc

SEQ ID NO: 6098623 - DNA, 20 bp, Homo sapien
gagagcaccgaacactcgta

SEQ ID NO: 6098624 - DNA, 20 bp, Homo sapien
tacgaacgtcttggcagtcg

SEQ ID NO: 6098625 - DNA, 20 bp, Homo sapien
cgactgccaagacgttcgta

SEQ ID NO: 6098626 - DNA, 20 bp, Homo sapien
tacacaagttgcctctgtct

SEQ ID NO: 6098627 - DNA, 20 bp, Homo sapien
agacagaggcaacttgtgta

SEQ ID NO: 6098628 - DNA, 20 bp, Homo sapien
taagccagtgtgtcgtgtct

SEQ ID NO: 6098629 - DNA, 20 bp, Homo sapien
agacacgacacactggctta

SEQ ID NO: 6098630 - DNA, 20 bp, Homo sapien
taacgtgtaagttgactgcg

SEQ ID NO: 6098631 - DNA, 20 bp, Homo sapien
cgcagtcaacttacacgtta

SEQ ID NO: 6098632 - DNA, 20 bp, Homo sapien
taaatcgcttcttcgtaccg

SEQ ID NO: 6098633 - DNA, 20 bp, Homo sapien
cggtacgaagaagcgattta

SEQ ID NO: 6098634 - DNA, 20 bp, Homo sapien
gtttgattcatatcgaggcg

SEQ ID NO: 6098635 - DNA, 20 bp, Homo sapien
cgcctcgatatgaatcaaac

SEQ ID NO: 6098636 - DNA, 20 bp, Homo sapien
gtttacctgtctgtcggacg

SEQ ID NO: 6098637 - DNA, 20 bp, Homo sapien
cgtccgacagacaggtaaac

SEQ ID NO: 6098638 - DNA, 20 bp, Homo sapien
gttgtcgcagtgtctgtacc

SEQ ID NO: 6098639 - DNA, 20 bp, Homo sapien
ggtacagacactgcgacaac

SEQ ID NO: 6098640 - DNA, 20 bp, Homo sapien
gttgccactcgttgatagtc

SEQ ID NO: 6098641 - DNA, 20 bp, Homo sapien
gactatcaacgagtggcaac

SEQ ID NO: 6098642 - DNA, 20 bp, Homo sapien
gactaggtgcatgtctcact

SEQ ID NO: 6098643 - DNA, 20 bp, Homo sapien
agtgagacatgcacctagtc

SEQ ID NO: 6098644 - DNA, 20 bp, Homo sapien
gttgcagatcctgttccgtc

SEQ ID NO: 6098645 - DNA, 20 bp, Homo sapien
gacggaacaggatctgcaac

SEQ ID NO: 6098646 - DNA, 20 bp, Homo sapien
gttgatagtagttctgccgc

SEQ ID NO: 6098647 - DNA, 20 bp, Homo sapien
gcggcagaactactatcaac

SEQ ID NO: 6098648 - DNA, 20 bp, Homo sapien
gttccttatatgtccgggcg

SEQ ID NO: 6098649 - DNA, 20 bp, Homo sapien
cgcccggacatataaggaac

SEQ ID NO: 6098650 - DNA, 20 bp, Homo sapien
gttatgttctaatgccggag

SEQ ID NO: 6098651 - DNA, 20 bp, Homo sapien
ctccggcattagaacataac

SEQ ID NO: 6098652 - DNA, 20 bp, Homo sapien
gttaaaccttgatcggaagc

SEQ ID NO: 6098653 - DNA, 20 bp, Homo sapien
gcttccgatcaaggtttaac

SEQ ID NO: 6098654 - DNA, 20 bp, Homo sapien
gtgttgcctaatcttcgcgc

SEQ ID NO: 6098655 - DNA, 20 bp, Homo sapien
gcgcgaagattaggcaacac

SEQ ID NO: 6098656 - DNA, 20 bp, Homo sapien
gtgtcatgttatcgtggacc

SEQ ID NO: 6098657 - DNA, 20 bp, Homo sapien
ggtccacgataacatgacac

SEQ ID NO: 6098658 - DNA, 20 bp, Homo sapien
gtgtaagttctgctagtgca

SEQ ID NO: 6098659 - DNA, 20 bp, Homo sapien
tgcactagcagaacttacac

SEQ ID NO: 6098660 - DNA, 20 bp, Homo sapien
gtgcccagtggttcgcataa

SEQ ID NO: 6098661 - DNA, 20 bp, Homo sapien
ttatgcgaaccactgggcac

SEQ ID NO: 6098662 - DNA, 20 bp, Homo sapien
gtgattctgtacgtgtcgcc

SEQ ID NO: 6098663 - DNA, 20 bp, Homo sapien
ggcgacacgtacagaatcac

SEQ ID NO: 6098664 - DNA, 20 bp, Homo sapien
ccacgcagtgctagaggata

SEQ ID NO: 6098665 - DNA, 20 bp, Homo sapien
tatcctctagcactgcgtgg

SEQ ID NO: 6098666 - DNA, 20 bp, Homo sapien
gtgattaagtctgcttcggc

SEQ ID NO: 6098667 - DNA, 20 bp, Homo sapien
gccgaagcagacttaatcac

SEQ ID NO: 6098668 - DNA, 20 bp, Homo sapien
gtgatgagttctcggtcaat

SEQ ID NO: 6098669 - DNA, 20 bp, Homo sapien
attgaccgagaactcatcac

SEQ ID NO: 6098670 - DNA, 20 bp, Homo sapien
gtgatcgagtctgtctgctc

SEQ ID NO: 6098671 - DNA, 20 bp, Homo sapien
gagcagacagactcgatcac

SEQ ID NO: 6098672 - DNA, 20 bp, Homo sapien
gtgaaacttcgtgttagtgc

SEQ ID NO: 6098673 - DNA, 20 bp, Homo sapien
gcactaacacgaagtttcac

SEQ ID NO: 6098674 - DNA, 20 bp, Homo sapien
gtctggtattcgtgtccgca

SEQ ID NO: 6098675 - DNA, 20 bp, Homo sapien
tgcggacacgaataccagac

SEQ ID NO: 6098676 - DNA, 20 bp, Homo sapien
gtcgtgtgtctcatgtcgca

SEQ ID NO: 6098677 - DNA, 20 bp, Homo sapien
tgcgacatgagacacacgac

SEQ ID NO: 6098678 - DNA, 20 bp, Homo sapien
gtcggttctatcgtatgagc

SEQ ID NO: 6098679 - DNA, 20 bp, Homo sapien
gctcatacgatagaaccgac

SEQ ID NO: 6098680 - DNA, 20 bp, Homo sapien
gtcgcatatcgttctaccta

SEQ ID NO: 6098681 - DNA, 20 bp, Homo sapien
taggtagaacgatatgcgac

SEQ ID NO: 6098682 - DNA, 20 bp, Homo sapien
gtcgagattcgtcgtgtcct

SEQ ID NO: 6098683 - DNA, 20 bp, Homo sapien
aggacacgacgaatctcgac

SEQ ID NO: 6098684 - DNA, 20 bp, Homo sapien
gtcctcttcgcttatcggag

SEQ ID NO: 6098685 - DNA, 20 bp, Homo sapien
ctccgataagcgaagaggac

SEQ ID NO: 6098686 - DNA, 20 bp, Homo sapien
atgaatactactgacgcctg

SEQ ID NO: 6098687 - DNA, 20 bp, Homo sapien
caggcgtcagtagtattcat

SEQ ID NO: 6098688 - DNA, 20 bp, Homo sapien
gtccgtgttctaactcgtgc

SEQ ID NO: 6098689 - DNA, 20 bp, Homo sapien
gcacgagttagaacacggac

SEQ ID NO: 6098690 - DNA, 20 bp, Homo sapien
gtcccacatggtgcttcgta

SEQ ID NO: 6098691 - DNA, 20 bp, Homo sapien
tacgaagcaccatgtgggac

SEQ ID NO: 6098692 - DNA, 20 bp, Homo sapien
gtcaggtgttcgcgctcatt

SEQ ID NO: 6098693 - DNA, 20 bp, Homo sapien
aatgagcgcgaacacctgac

SEQ ID NO: 6098694 - DNA, 20 bp, Homo sapien
gtcacgtatggttcgctgct

SEQ ID NO: 6098695 - DNA, 20 bp, Homo sapien
agcagcgaaccatacgtgac

SEQ ID NO: 6098696 - DNA, 20 bp, Homo sapien
gtcacgcggtctcgttcatt

SEQ ID NO: 6098697 - DNA, 20 bp, Homo sapien
aatgaacgagaccgcgtgac

SEQ ID NO: 6098698 - DNA, 20 bp, Homo sapien
gtatttaaccaagtgtggcg

SEQ ID NO: 6098699 - DNA, 20 bp, Homo sapien
cgccacacttggttaaatac

SEQ ID NO: 6098700 - DNA, 20 bp, Homo sapien
gtatctgcttatgtcgcccg

SEQ ID NO: 6098701 - DNA, 20 bp, Homo sapien
cgggcgacataagcagatac

SEQ ID NO: 6098702 - DNA, 20 bp, Homo sapien
gtatcgcattcggttcgtcg

SEQ ID NO: 6098703 - DNA, 20 bp, Homo sapien
cgacgaaccgaatgcgatac

SEQ ID NO: 6098704 - DNA, 20 bp, Homo sapien
gtatcatgttatagggctgc

SEQ ID NO: 6098705 - DNA, 20 bp, Homo sapien
gcagccctataacatgatac

SEQ ID NO: 6098706 - DNA, 20 bp, Homo sapien
gtagtctgttaatgtcgagc

SEQ ID NO: 6098707 - DNA, 20 bp, Homo sapien
gctcgacattaacagactac

SEQ ID NO: 6098708 - DNA, 20 bp, Homo sapien
agccaagtgcaggcgtacat

SEQ ID NO: 6098709 - DNA, 20 bp, Homo sapien
atgtacgcctgcacttggct

SEQ ID NO: 6098710 - DNA, 20 bp, Homo sapien
gtagattcctgtgatgtgac

SEQ ID NO: 6098711 - DNA, 20 bp, Homo sapien
gtcacatcacaggaatctac

SEQ ID NO: 6098712 - DNA, 20 bp, Homo sapien
gtacttctgaaacgtgatgg

SEQ ID NO: 6098713 - DNA, 20 bp, Homo sapien
ccatcacgtttcagaagtac

SEQ ID NO: 6098714 - DNA, 20 bp, Homo sapien
gtactatgtgtgagtgctcc

SEQ ID NO: 6098715 - DNA, 20 bp, Homo sapien
ggagcactcacacatagtac

SEQ ID NO: 6098716 - DNA, 20 bp, Homo sapien
gtaccagattcgggatgtct

SEQ ID NO: 6098717 - DNA, 20 bp, Homo sapien
agacatcccgaatctggtac

SEQ ID NO: 6098718 - DNA, 20 bp, Homo sapien
gtacatgattcgtcagtgtg

SEQ ID NO: 6098719 - DNA, 20 bp, Homo sapien
cacactgacgaatcatgtac

SEQ ID NO: 6098720 - DNA, 20 bp, Homo sapien
gtaattcgtcagctctctgg

SEQ ID NO: 6098721 - DNA, 20 bp, Homo sapien
ccagagagctgacgaattac

SEQ ID NO: 6098722 - DNA, 20 bp, Homo sapien
ggttcgcttacgttgcatag

SEQ ID NO: 6098723 - DNA, 20 bp, Homo sapien
ctatgcaacgtaagcgaacc

SEQ ID NO: 6098724 - DNA, 20 bp, Homo sapien
ggtgatacttcgctatatgg

SEQ ID NO: 6098725 - DNA, 20 bp, Homo sapien
ccatatagcgaagtatcacc

SEQ ID NO: 6098726 - DNA, 20 bp, Homo sapien
ggtcttgccaacgtctgtga

SEQ ID NO: 6098727 - DNA, 20 bp, Homo sapien
tcacagacgttggcaagacc

SEQ ID NO: 6098728 - DNA, 20 bp, Homo sapien
ggtcgttatcgttagtgccc

SEQ ID NO: 6098729 - DNA, 20 bp, Homo sapien
gggcactaacgataacgacc

SEQ ID NO: 6098730 - DNA, 20 bp, Homo sapien
agccaaagtgcatactgcgc

SEQ ID NO: 6098731 - DNA, 20 bp, Homo sapien
gcgcagtatgcactttggct

SEQ ID NO: 6098732 - DNA, 20 bp, Homo sapien
ggtatcttcatctgtggagc

SEQ ID NO: 6098733 - DNA, 20 bp, Homo sapien
gctccacagatgaagatacc

SEQ ID NO: 6098734 - DNA, 20 bp, Homo sapien
gggtggtctgtctatctcca

SEQ ID NO: 6098735 - DNA, 20 bp, Homo sapien
tggagatagacagaccaccc

SEQ ID NO: 6098736 - DNA, 20 bp, Homo sapien
gggtgctgtctatgtactca

SEQ ID NO: 6098737 - DNA, 20 bp, Homo sapien
tgagtacatagacagcaccc

SEQ ID NO: 6098738 - DNA, 20 bp, Homo sapien
gggcattcgtaccgtgtcta

SEQ ID NO: 6098739 - DNA, 20 bp, Homo sapien
tagacacggtacgaatgccc

SEQ ID NO: 6098740 - DNA, 20 bp, Homo sapien
ggctcgaatgttgcacacgt

SEQ ID NO: 6098741 - DNA, 20 bp, Homo sapien
acgtgtgcaacattcgagcc

SEQ ID NO: 6098742 - DNA, 20 bp, Homo sapien
ggctcacgtcttatttgggc

SEQ ID NO: 6098743 - DNA, 20 bp, Homo sapien
gcccaaataagacgtgagcc

SEQ ID NO: 6098744 - DNA, 20 bp, Homo sapien
ggctagtattgacatctacg

SEQ ID NO: 6098745 - DNA, 20 bp, Homo sapien
cgtagatgtcaatactagcc

SEQ ID NO: 6098746 - DNA, 20 bp, Homo sapien
ggctacttgagacggtcctt

SEQ ID NO: 6098747 - DNA, 20 bp, Homo sapien
aaggaccgtctcaagtagcc

SEQ ID NO: 6098748 - DNA, 20 bp, Homo sapien
ggcgttcgtgcagcttactt

SEQ ID NO: 6098749 - DNA, 20 bp, Homo sapien
aagtaagctgcacgaacgcc

SEQ ID NO: 6098750 - DNA, 20 bp, Homo sapien
ggcgactgtgtccgtctata

SEQ ID NO: 6098751 - DNA, 20 bp, Homo sapien
tatagacggacacagtcgcc

SEQ ID NO: 6098752 - DNA, 20 bp, Homo sapien
agcatggacataagtcgcgc

SEQ ID NO: 6098753 - DNA, 20 bp, Homo sapien
gcgcgacttatgtccatgct

SEQ ID NO: 6098754 - DNA, 20 bp, Homo sapien
ggcgaacgtcgtctgctata

SEQ ID NO: 6098755 - DNA, 20 bp, Homo sapien
tatagcagacgacgttcgcc

SEQ ID NO: 6098756 - DNA, 20 bp, Homo sapien
ggccgtcatgtctattcagt

SEQ ID NO: 6098757 - DNA, 20 bp, Homo sapien
actgaatagacatgacggcc

SEQ ID NO: 6098758 - DNA, 20 bp, Homo sapien
ggcatcgaggttccgtacat

SEQ ID NO: 6098759 - DNA, 20 bp, Homo sapien
atgtacggaacctcgatgcc

SEQ ID NO: 6098760 - DNA, 20 bp, Homo sapien
ggcaagtcttatactgtgtg

SEQ ID NO: 6098761 - DNA, 20 bp, Homo sapien
cacacagtataagacttgcc

SEQ ID NO: 6098762 - DNA, 20 bp, Homo sapien
ggcaaatgttactcgtgtgt

SEQ ID NO: 6098763 - DNA, 20 bp, Homo sapien
acacacgagtaacatttgcc

SEQ ID NO: 6098764 - DNA, 20 bp, Homo sapien
ggcaaacgtctgtcggtcat

SEQ ID NO: 6098765 - DNA, 20 bp, Homo sapien
atgaccgacagacgtttgcc

SEQ ID NO: 6098766 - DNA, 20 bp, Homo sapien
ggatgctctgtgtactgtcc

SEQ ID NO: 6098767 - DNA, 20 bp, Homo sapien
ggacagtacacagagcatcc

SEQ ID NO: 6098768 - DNA, 20 bp, Homo sapien
ggatcacgtctggtgtacta

SEQ ID NO: 6098769 - DNA, 20 bp, Homo sapien
tagtacaccagacgtgatcc

SEQ ID NO: 6098770 - DNA, 20 bp, Homo sapien
ggatagttcctacgtgtgct

SEQ ID NO: 6098771 - DNA, 20 bp, Homo sapien
agcacacgtaggaactatcc

SEQ ID NO: 6098772 - DNA, 20 bp, Homo sapien
ggatacttcgatagcgttgt

SEQ ID NO: 6098773 - DNA, 20 bp, Homo sapien
acaacgctatcgaagtatcc

SEQ ID NO: 6098774 - DNA, 20 bp, Homo sapien
agcatgactaactgccacta

SEQ ID NO: 6098775 - DNA, 20 bp, Homo sapien
tagtggcagttagtcatgct

SEQ ID NO: 6098776 - DNA, 20 bp, Homo sapien
ggatactattccgtgcgtgt

SEQ ID NO: 6098777 - DNA, 20 bp, Homo sapien
acacgcacggaatagtatcc

SEQ ID NO: 6098778 - DNA, 20 bp, Homo sapien
ggagattcgtacaactgtgt

SEQ ID NO: 6098779 - DNA, 20 bp, Homo sapien
acacagttgtacgaatctcc

SEQ ID NO: 6098780 - DNA, 20 bp, Homo sapien
ggacgcttgaccggacttat

SEQ ID NO: 6098781 - DNA, 20 bp, Homo sapien
ataagtccggtcaagcgtcc

SEQ ID NO: 6098782 - DNA, 20 bp, Homo sapien
ggaaattcgaccgtgtgcta

SEQ ID NO: 6098783 - DNA, 20 bp, Homo sapien
tagcacacggtcgaatttcc

SEQ ID NO: 6098784 - DNA, 20 bp, Homo sapien
gcttatgatctgtgtaacgc

SEQ ID NO: 6098785 - DNA, 20 bp, Homo sapien
gcgttacacagatcataagc

SEQ ID NO: 6098786 - DNA, 20 bp, Homo sapien
gcttagtctggtggtcatcc

SEQ ID NO: 6098787 - DNA, 20 bp, Homo sapien
ggatgaccaccagactaagc

SEQ ID NO: 6098788 - DNA, 20 bp, Homo sapien
gcttacttcctagctctgga

SEQ ID NO: 6098789 - DNA, 20 bp, Homo sapien
tccagagctaggaagtaagc

SEQ ID NO: 6098790 - DNA, 20 bp, Homo sapien
gctgttccgtaagtgtgatc

SEQ ID NO: 6098791 - DNA, 20 bp, Homo sapien
gatcacacttacggaacagc

SEQ ID NO: 6098792 - DNA, 20 bp, Homo sapien
gctctaggttccgggtacta

SEQ ID NO: 6098793 - DNA, 20 bp, Homo sapien
tagtacccggaacctagagc

SEQ ID NO: 6098794 - DNA, 20 bp, Homo sapien
gcgtgtgtggactctctcta

SEQ ID NO: 6098795 - DNA, 20 bp, Homo sapien
tagagagagtccacacacgc

SEQ ID NO: 6098796 - DNA, 20 bp, Homo sapien
aagcgtactcacgactcatg

SEQ ID NO: 6098797 - DNA, 20 bp, Homo sapien
catgagtcgtgagtacgctt

SEQ ID NO: 6098798 - DNA, 20 bp, Homo sapien
gcgtgtaatctgtctctccg

SEQ ID NO: 6098799 - DNA, 20 bp, Homo sapien
cggagagacagattacacgc

SEQ ID NO: 6098800 - DNA, 20 bp, Homo sapien
gcgtatgtgagtcgtctcta

SEQ ID NO: 6098801 - DNA, 20 bp, Homo sapien
tagagacgactcacatacgc

SEQ ID NO: 6098802 - DNA, 20 bp, Homo sapien
gcggtgttcaagctcgctat

SEQ ID NO: 6098803 - DNA, 20 bp, Homo sapien
atagcgagcttgaacaccgc

SEQ ID NO: 6098804 - DNA, 20 bp, Homo sapien
gcggtcggtgtacctatcta

SEQ ID NO: 6098805 - DNA, 20 bp, Homo sapien
tagataggtacaccgaccgc

SEQ ID NO: 6098806 - DNA, 20 bp, Homo sapien
gcggcgcattcgttgtttaa

SEQ ID NO: 6098807 - DNA, 20 bp, Homo sapien
ttaaacaacgaatgcgccgc

SEQ ID NO: 6098808 - DNA, 20 bp, Homo sapien
gcgctatcttcagtcctgta

SEQ ID NO: 6098809 - DNA, 20 bp, Homo sapien
tacaggactgaagatagcgc

SEQ ID NO: 6098810 - DNA, 20 bp, Homo sapien
gcgcgagatgtgctacctat

SEQ ID NO: 6098811 - DNA, 20 bp, Homo sapien
ataggtagcacatctcgcgc

SEQ ID NO: 6098812 - DNA, 20 bp, Homo sapien
gcgccttctttcgtataaac

SEQ ID NO: 6098813 - DNA, 20 bp, Homo sapien
gtttatacgaaagaaggcgc

SEQ ID NO: 6098814 - DNA, 20 bp, Homo sapien
gcgcctactgtgtatgagtc

SEQ ID NO: 6098815 - DNA, 20 bp, Homo sapien
gactcatacacagtaggcgc

SEQ ID NO: 6098816 - DNA, 20 bp, Homo sapien
gcgatcactgttaatacacg

SEQ ID NO: 6098817 - DNA, 20 bp, Homo sapien
cgtgtattaacagtgatcgc

SEQ ID NO: 6098818 - DNA, 20 bp, Homo sapien
gccgacactgtgctcgataa

SEQ ID NO: 6098819 - DNA, 20 bp, Homo sapien
ttatcgagcacagtgtcggc

SEQ ID NO: 6098820 - DNA, 20 bp, Homo sapien
gcctctcgttcagtatgctg

SEQ ID NO: 6098821 - DNA, 20 bp, Homo sapien
cagcatactgaacgagaggc

SEQ ID NO: 6098822 - DNA, 20 bp, Homo sapien
gcgacgtgtagtgtacctaa

SEQ ID NO: 6098823 - DNA, 20 bp, Homo sapien
ttaggtacactacacgtcgc

SEQ ID NO: 6098824 - DNA, 20 bp, Homo sapien
gccttggctaccgtgttata

SEQ ID NO: 6098825 - DNA, 20 bp, Homo sapien
tataacacggtagccaaggc

SEQ ID NO: 6098826 - DNA, 20 bp, Homo sapien
gccttagtgctgatgtatgc

SEQ ID NO: 6098827 - DNA, 20 bp, Homo sapien
gcatacatcagcactaaggc

SEQ ID NO: 6098828 - DNA, 20 bp, Homo sapien
gcctcgaatgtgtaatcgtc

SEQ ID NO: 6098829 - DNA, 20 bp, Homo sapien
gacgattacacattcgaggc

SEQ ID NO: 6098830 - DNA, 20 bp, Homo sapien
gccgcgttattacagtgtct

SEQ ID NO: 6098831 - DNA, 20 bp, Homo sapien
agacactgtaataacgcggc

SEQ ID NO: 6098832 - DNA, 20 bp, Homo sapien
gccgcaagttcgtttggctt

SEQ ID NO: 6098833 - DNA, 20 bp, Homo sapien
aagccaaacgaacttgcggc

SEQ ID NO: 6098834 - DNA, 20 bp, Homo sapien
gcccgctatggtgagtctaa

SEQ ID NO: 6098835 - DNA, 20 bp, Homo sapien
ttagactcaccatagcgggc

SEQ ID NO: 6098836 - DNA, 20 bp, Homo sapien
gccacaaatgtcgttaggta

SEQ ID NO: 6098837 - DNA, 20 bp, Homo sapien
tacctaacgacatttgtggc

SEQ ID NO: 6098838 - DNA, 20 bp, Homo sapien
gcattacttacgtgtgtcgg

SEQ ID NO: 6098839 - DNA, 20 bp, Homo sapien
ccgacacacgtaagtaatgc

SEQ ID NO: 6098840 - DNA, 20 bp, Homo sapien
gcatctgtcggtgcgtcaat

SEQ ID NO: 6098841 - DNA, 20 bp, Homo sapien
attgacgcaccgacagatgc

SEQ ID NO: 6098842 - DNA, 20 bp, Homo sapien
gatatgcgttacgtgagtct

SEQ ID NO: 6098843 - DNA, 20 bp, Homo sapien
agactcacgtaacgcatatc

SEQ ID NO: 6098844 - DNA, 20 bp, Homo sapien
gcagtatgtatcctgatcgt

SEQ ID NO: 6098845 - DNA, 20 bp, Homo sapien
acgatcaggatacatactgc

SEQ ID NO: 6098846 - DNA, 20 bp, Homo sapien
gcagggaattgccgaccata

SEQ ID NO: 6098847 - DNA, 20 bp, Homo sapien
tatggtcggcaattccctgc

SEQ ID NO: 6098848 - DNA, 20 bp, Homo sapien
gcacatcgtgtcgctgctaa

SEQ ID NO: 6098849 - DNA, 20 bp, Homo sapien
ttagcagcgacacgatgtgc

SEQ ID NO: 6098850 - DNA, 20 bp, Homo sapien
gcaattacgtcgctcttagt

SEQ ID NO: 6098851 - DNA, 20 bp, Homo sapien
actaagagcgacgtaattgc

SEQ ID NO: 6098852 - DNA, 20 bp, Homo sapien
gcaagcacttagtcgtgtcg

SEQ ID NO: 6098853 - DNA, 20 bp, Homo sapien
cgacacgactaagtgcttgc

SEQ ID NO: 6098854 - DNA, 20 bp, Homo sapien
gattgatcgacattcgctgg

SEQ ID NO: 6098855 - DNA, 20 bp, Homo sapien
ccagcgaatgtcgatcaatc

SEQ ID NO: 6098856 - DNA, 20 bp, Homo sapien
gattcggatacgttatagcg

SEQ ID NO: 6098857 - DNA, 20 bp, Homo sapien
cgctataacgtatccgaatc

SEQ ID NO: 6098858 - DNA, 20 bp, Homo sapien
gattcatgcacgttcgttcc

SEQ ID NO: 6098859 - DNA, 20 bp, Homo sapien
ggaacgaacgtgcatgaatc

SEQ ID NO: 6098860 - DNA, 20 bp, Homo sapien
gattcatagatcgtgagtcc

SEQ ID NO: 6098861 - DNA, 20 bp, Homo sapien
ggactcacgatctatgaatc

SEQ ID NO: 6098862 - DNA, 20 bp, Homo sapien
gattatactactgtcaggcg

SEQ ID NO: 6098863 - DNA, 20 bp, Homo sapien
cgcctgacagtagtataatc

SEQ ID NO: 6098864 - DNA, 20 bp, Homo sapien
gactacgatgtgatccgtgt

SEQ ID NO: 6098865 - DNA, 20 bp, Homo sapien
acacggatcacatcgtagtc

SEQ ID NO: 6098866 - DNA, 20 bp, Homo sapien
gattagagtgctgtcgctcc

SEQ ID NO: 6098867 - DNA, 20 bp, Homo sapien
ggagcgacagcactctaatc

SEQ ID NO: 6098868 - DNA, 20 bp, Homo sapien
gattacgttaagttacggcg

SEQ ID NO: 6098869 - DNA, 20 bp, Homo sapien
cgccgtaacttaacgtaatc

SEQ ID NO: 6098870 - DNA, 20 bp, Homo sapien
gatgtgctgaactctgcttc

SEQ ID NO: 6098871 - DNA, 20 bp, Homo sapien
gaagcagagttcagcacatc

SEQ ID NO: 6098872 - DNA, 20 bp, Homo sapien
gatgtgattaacgtcgtcgt

SEQ ID NO: 6098873 - DNA, 20 bp, Homo sapien
acgacgacgttaatcacatc

SEQ ID NO: 6098874 - DNA, 20 bp, Homo sapien
gatgtcgtggagtcctctca

SEQ ID NO: 6098875 - DNA, 20 bp, Homo sapien
tgagaggactccacgacatc

SEQ ID NO: 6098876 - DNA, 20 bp, Homo sapien
gatgcgctgtgcgtactcta

SEQ ID NO: 6098877 - DNA, 20 bp, Homo sapien
tagagtacgcacagcgcatc

SEQ ID NO: 6098878 - DNA, 20 bp, Homo sapien
gatgcccttccaatcgtggt

SEQ ID NO: 6098879 - DNA, 20 bp, Homo sapien
accacgattggaagggcatc

SEQ ID NO: 6098880 - DNA, 20 bp, Homo sapien
gatgcacgttatcgtcgagt

SEQ ID NO: 6098881 - DNA, 20 bp, Homo sapien
actcgacgataacgtgcatc

SEQ ID NO: 6098882 - DNA, 20 bp, Homo sapien
gatgactgtgactggtccct

SEQ ID NO: 6098883 - DNA, 20 bp, Homo sapien
agggaccagtcacagtcatc

SEQ ID NO: 6098884 - DNA, 20 bp, Homo sapien
gatcgtcattcagatacgtg

SEQ ID NO: 6098885 - DNA, 20 bp, Homo sapien
cacgtatctgaatgacgatc

SEQ ID NO: 6098886 - DNA, 20 bp, Homo sapien
gactaatatcgagtatgcgg

SEQ ID NO: 6098887 - DNA, 20 bp, Homo sapien
ccgcatactcgatattagtc

SEQ ID NO: 6098888 - DNA, 20 bp, Homo sapien
gatcgtatggtccgctctca

SEQ ID NO: 6098889 - DNA, 20 bp, Homo sapien
tgagagcggaccatacgatc

SEQ ID NO: 6098890 - DNA, 20 bp, Homo sapien
gatcctactgtcggtctgtg

SEQ ID NO: 6098891 - DNA, 20 bp, Homo sapien
cacagaccgacagtaggatc

SEQ ID NO: 6098892 - DNA, 20 bp, Homo sapien
gatcagttcagacgtatgtc

SEQ ID NO: 6098893 - DNA, 20 bp, Homo sapien
gacatacgtctgaactgatc

SEQ ID NO: 6098894 - DNA, 20 bp, Homo sapien
gatcaccgttagtagtctgt

SEQ ID NO: 6098895 - DNA, 20 bp, Homo sapien
acagactactaacggtgatc

SEQ ID NO: 6098896 - DNA, 20 bp, Homo sapien
gagttcgaccctcttgtcat

SEQ ID NO: 6098897 - DNA, 20 bp, Homo sapien
atgacaagagggtcgaactc

SEQ ID NO: 6098898 - DNA, 20 bp, Homo sapien
gagttcccgtgcgttagatc

SEQ ID NO: 6098899 - DNA, 20 bp, Homo sapien
gatctaacgcacgggaactc

SEQ ID NO: 6098900 - DNA, 20 bp, Homo sapien
gagttatatctgtgctacgg

SEQ ID NO: 6098901 - DNA, 20 bp, Homo sapien
ccgtagcacagatataactc

SEQ ID NO: 6098902 - DNA, 20 bp, Homo sapien
gagtatcttacctggtctag

SEQ ID NO: 6098903 - DNA, 20 bp, Homo sapien
ctagaccaggtaagatactc

SEQ ID NO: 6098904 - DNA, 20 bp, Homo sapien
gaggatgttaccactgtgac

SEQ ID NO: 6098905 - DNA, 20 bp, Homo sapien
gtcacagtggtaacatcctc

SEQ ID NO: 6098906 - DNA, 20 bp, Homo sapien
gagcgttatgcacatggcac

SEQ ID NO: 6098907 - DNA, 20 bp, Homo sapien
gtgccatgtgcataacgctc

SEQ ID NO: 6098908 - DNA, 20 bp, Homo sapien
ctgtgactgactgtagctct

SEQ ID NO: 6098909 - DNA, 20 bp, Homo sapien
agagctacagtcagtcacag

SEQ ID NO: 6098910 - DNA, 20 bp, Homo sapien
gagcgaatgctgtctgacct

SEQ ID NO: 6098911 - DNA, 20 bp, Homo sapien
aggtcagacagcattcgctc

SEQ ID NO: 6098912 - DNA, 20 bp, Homo sapien
gagcctagttccgaatggca

SEQ ID NO: 6098913 - DNA, 20 bp, Homo sapien
tgccattcggaactaggctc

SEQ ID NO: 6098914 - DNA, 20 bp, Homo sapien
gagcagtctgtctcgcctaa

SEQ ID NO: 6098915 - DNA, 20 bp, Homo sapien
ttaggcgagacagactgctc

SEQ ID NO: 6098916 - DNA, 20 bp, Homo sapien
gagcactgtatcggtatcta

SEQ ID NO: 6098917 - DNA, 20 bp, Homo sapien
tagataccgatacagtgctc

SEQ ID NO: 6098918 - DNA, 20 bp, Homo sapien
gagatgcttagtacgccttc

SEQ ID NO: 6098919 - DNA, 20 bp, Homo sapien
gaaggcgtactaagcatctc

SEQ ID NO: 6098920 - DNA, 20 bp, Homo sapien
gagatccatgtgatgacgta

SEQ ID NO: 6098921 - DNA, 20 bp, Homo sapien
tacgtcatcacatggatctc

SEQ ID NO: 6098922 - DNA, 20 bp, Homo sapien
gacttgggcaacgtctctct

SEQ ID NO: 6098923 - DNA, 20 bp, Homo sapien
agagagacgttgcccaagtc

SEQ ID NO: 6098924 - DNA, 20 bp, Homo sapien
gactggcttaggtcgtctct

SEQ ID NO: 6098925 - DNA, 20 bp, Homo sapien
agagacgacctaagccagtc

SEQ ID NO: 6098926 - DNA, 20 bp, Homo sapien
gactatgtccgtatctgtag

SEQ ID NO: 6098927 - DNA, 20 bp, Homo sapien
ctacagatacggacatagtc

SEQ ID NO: 6098928 - DNA, 20 bp, Homo sapien
gactatgcttcagaatacgg

SEQ ID NO: 6098929 - DNA, 20 bp, Homo sapien
ccgtattctgaagcatagtc

SEQ ID NO: 6098930 - DNA, 20 bp, Homo sapien
ctgtgacgtacctgtcgcat

SEQ ID NO: 6098931 - DNA, 20 bp, Homo sapien
atgcgacaggtacgtcacag

SEQ ID NO: 6098932 - DNA, 20 bp, Homo sapien
gacggcaattaccgcctgta

SEQ ID NO: 6098933 - DNA, 20 bp, Homo sapien
tacaggcggtaattgccgtc

SEQ ID NO: 6098934 - DNA, 20 bp, Homo sapien
gacgccgttatgagagtcca

SEQ ID NO: 6098935 - DNA, 20 bp, Homo sapien
tggactctcataacggcgtc

SEQ ID NO: 6098936 - DNA, 20 bp, Homo sapien
gacgcatatctctagttagg

SEQ ID NO: 6098937 - DNA, 20 bp, Homo sapien
cctaactagagatatgcgtc

SEQ ID NO: 6098938 - DNA, 20 bp, Homo sapien
gaccttcggacgctggttta

SEQ ID NO: 6098939 - DNA, 20 bp, Homo sapien
taaaccagcgtccgaaggtc

SEQ ID NO: 6098940 - DNA, 20 bp, Homo sapien
gaccagtctgtcgccttaga

SEQ ID NO: 6098941 - DNA, 20 bp, Homo sapien
tctaaggcgacagactggtc

SEQ ID NO: 6098942 - DNA, 20 bp, Homo sapien
gaccaagctcgttagatagt

SEQ ID NO: 6098943 - DNA, 20 bp, Homo sapien
actatctaacgagcttggtc

SEQ ID NO: 6098944 - DNA, 20 bp, Homo sapien
gacatctctgtagacttagg

SEQ ID NO: 6098945 - DNA, 20 bp, Homo sapien
cctaagtctacagagatgtc

SEQ ID NO: 6098946 - DNA, 20 bp, Homo sapien
gacataactgtagtctgctc

SEQ ID NO: 6098947 - DNA, 20 bp, Homo sapien
gagcagactacagttatgtc

SEQ ID NO: 6098948 - DNA, 20 bp, Homo sapien
gacagacctggtatcgtcgt

SEQ ID NO: 6098949 - DNA, 20 bp, Homo sapien
acgacgataccaggtctgtc

SEQ ID NO: 6098950 - DNA, 20 bp, Homo sapien
gacactgctggtctgcgaat

SEQ ID NO: 6098951 - DNA, 20 bp, Homo sapien
attcgcagaccagcagtgtc

SEQ ID NO: 6098952 - DNA, 20 bp, Homo sapien
ctgtcgtctagtctctgagg

SEQ ID NO: 6098953 - DNA, 20 bp, Homo sapien
cctcagagactagacgacag

SEQ ID NO: 6098954 - DNA, 20 bp, Homo sapien
gacacgttagtgcggtctct

SEQ ID NO: 6098955 - DNA, 20 bp, Homo sapien
agagaccgcactaacgtgtc

SEQ ID NO: 6098956 - DNA, 20 bp, Homo sapien
gaatctacttagtgacggtg

SEQ ID NO: 6098957 - DNA, 20 bp, Homo sapien
caccgtcactaagtagattc

SEQ ID NO: 6098958 - DNA, 20 bp, Homo sapien
gaatactatggtcagtcgtg

SEQ ID NO: 6098959 - DNA, 20 bp, Homo sapien
cacgactgaccatagtattc

SEQ ID NO: 6098960 - DNA, 20 bp, Homo sapien
gaatacgctgtgatcgagct

SEQ ID NO: 6098961 - DNA, 20 bp, Homo sapien
agctcgatcacagcgtattc

SEQ ID NO: 6098962 - DNA, 20 bp, Homo sapien
gaagtgcgttcaacaggtct

SEQ ID NO: 6098963 - DNA, 20 bp, Homo sapien
agacctgttgaacgcacttc

SEQ ID NO: 6098964 - DNA, 20 bp, Homo sapien
gaagtgccttagatccgtgt

SEQ ID NO: 6098965 - DNA, 20 bp, Homo sapien
acacggatctaaggcacttc

SEQ ID NO: 6098966 - DNA, 20 bp, Homo sapien
gaaatcgaggtgcgtcacac

SEQ ID NO: 6098967 - DNA, 20 bp, Homo sapien
gtgtgacgcacctcgatttc

SEQ ID NO: 6098968 - DNA, 20 bp, Homo sapien
gaaagtacgtccgtctcggt

SEQ ID NO: 6098969 - DNA, 20 bp, Homo sapien
accgagacggacgtactttc

SEQ ID NO: 6098970 - DNA, 20 bp, Homo sapien
gaaacgtctagttacggtga

SEQ ID NO: 6098971 - DNA, 20 bp, Homo sapien
tcaccgtaactagacgtttc

SEQ ID NO: 6098972 - DNA, 20 bp, Homo sapien
ctttgttcgtctaaacgccg

SEQ ID NO: 6098973 - DNA, 20 bp, Homo sapien
cggcgtttagacgaacaaag

SEQ ID NO: 6098974 - DNA, 20 bp, Homo sapien
cggctccattacactatatg

SEQ ID NO: 6098975 - DNA, 20 bp, Homo sapien
catatagtgtaatggagccg

SEQ ID NO: 6098976 - DNA, 20 bp, Homo sapien
ctttgaggttaagtcgcctg

SEQ ID NO: 6098977 - DNA, 20 bp, Homo sapien
caggcgacttaacctcaaag

SEQ ID NO: 6098978 - DNA, 20 bp, Homo sapien
ctttcaagtaccttagctcg

SEQ ID NO: 6098979 - DNA, 20 bp, Homo sapien
cgagctaaggtacttgaaag

SEQ ID NO: 6098980 - DNA, 20 bp, Homo sapien
ctttacataactggtccggt

SEQ ID NO: 6098981 - DNA, 20 bp, Homo sapien
accggaccagttatgtaaag

SEQ ID NO: 6098982 - DNA, 20 bp, Homo sapien
cttgttacttaaatcgccgg

SEQ ID NO: 6098983 - DNA, 20 bp, Homo sapien
ccggcgatttaagtaacaag

SEQ ID NO: 6098984 - DNA, 20 bp, Homo sapien
cttgcgcggaatgtagttct

SEQ ID NO: 6098985 - DNA, 20 bp, Homo sapien
agaactacattccgcgcaag

SEQ ID NO: 6098986 - DNA, 20 bp, Homo sapien
cttgagcacgctgtgagtca

SEQ ID NO: 6098987 - DNA, 20 bp, Homo sapien
tgactcacagcgtgctcaag

SEQ ID NO: 6098988 - DNA, 20 bp, Homo sapien
cttgacaggactgcttactc

SEQ ID NO: 6098989 - DNA, 20 bp, Homo sapien
gagtaagcagtcctgtcaag

SEQ ID NO: 6098990 - DNA, 20 bp, Homo sapien
cttcgtggctagtctgtgac

SEQ ID NO: 6098991 - DNA, 20 bp, Homo sapien
gtcacagactagccacgaag

SEQ ID NO: 6098992 - DNA, 20 bp, Homo sapien
cttcggtatagttacgagtg

SEQ ID NO: 6098993 - DNA, 20 bp, Homo sapien
cactcgtaactataccgaag

SEQ ID NO: 6098994 - DNA, 20 bp, Homo sapien
cttcgatggtatgcgctcgt

SEQ ID NO: 6098995 - DNA, 20 bp, Homo sapien
acgagcgcataccatcgaag

SEQ ID NO: 6098996 - DNA, 20 bp, Homo sapien
ccacagagtgctcatagctg

SEQ ID NO: 6098997 - DNA, 20 bp, Homo sapien
cagctatgagcactctgtgg

SEQ ID NO: 6098998 - DNA, 20 bp, Homo sapien
cttcaggcaatgtactggta

SEQ ID NO: 6098999 - DNA, 20 bp, Homo sapien
taccagtacattgcctgaag

SEQ ID NO: 6099000 - DNA, 20 bp, Homo sapien
cttattctatacatggccgg

SEQ ID NO: 6099001 - DNA, 20 bp, Homo sapien
ccggccatgtatagaataag

SEQ ID NO: 6099002 - DNA, 20 bp, Homo sapien
cttattactaacgtctggcg

SEQ ID NO: 6099003 - DNA, 20 bp, Homo sapien
cgccagacgttagtaataag

SEQ ID NO: 6099004 - DNA, 20 bp, Homo sapien
cttatcgaaatgtgacggga

SEQ ID NO: 6099005 - DNA, 20 bp, Homo sapien
tcccgtcacatttcgataag

SEQ ID NO: 6099006 - DNA, 20 bp, Homo sapien
cttagtgagacttactcgtg

SEQ ID NO: 6099007 - DNA, 20 bp, Homo sapien
cacgagtaagtctcactaag

SEQ ID NO: 6099008 - DNA, 20 bp, Homo sapien
cttagccgtcgttatgacag

SEQ ID NO: 6099009 - DNA, 20 bp, Homo sapien
ctgtcataacgacggctaag

SEQ ID NO: 6099010 - DNA, 20 bp, Homo sapien
cttagaggtggtccgcctat

SEQ ID NO: 6099011 - DNA, 20 bp, Homo sapien
ataggcggaccacctctaag

SEQ ID NO: 6099012 - DNA, 20 bp, Homo sapien
cttagagcttatcgccatgt

SEQ ID NO: 6099013 - DNA, 20 bp, Homo sapien
acatggcgataagctctaag

SEQ ID NO: 6099014 - DNA, 20 bp, Homo sapien
cttacgcggatggtcgatat

SEQ ID NO: 6099015 - DNA, 20 bp, Homo sapien
atatcgaccatccgcgtaag

SEQ ID NO: 6099016 - DNA, 20 bp, Homo sapien
cttacgagtgctgctcatcg

SEQ ID NO: 6099017 - DNA, 20 bp, Homo sapien
cgatgagcagcactcgtaag

SEQ ID NO: 6099018 - DNA, 20 bp, Homo sapien
ccacaatatgcacgtatcgg

SEQ ID NO: 6099019 - DNA, 20 bp, Homo sapien
ccgatacgtgcatattgtgg

SEQ ID NO: 6099020 - DNA, 20 bp, Homo sapien
cttaccgctgtcgcatgtat

SEQ ID NO: 6099021 - DNA, 20 bp, Homo sapien
atacatgcgacagcggtaag

SEQ ID NO: 6099022 - DNA, 20 bp, Homo sapien
cttacactgcgttcagactg

SEQ ID NO: 6099023 - DNA, 20 bp, Homo sapien
cagtctgaacgcagtgtaag

SEQ ID NO: 6099024 - DNA, 20 bp, Homo sapien
cttaatgcgtgggtcgaact

SEQ ID NO: 6099025 - DNA, 20 bp, Homo sapien
agttcgacccacgcattaag

SEQ ID NO: 6099026 - DNA, 20 bp, Homo sapien
cttaactattagcgtcggtg

SEQ ID NO: 6099027 - DNA, 20 bp, Homo sapien
caccgacgctaatagttaag

SEQ ID NO: 6099028 - DNA, 20 bp, Homo sapien
ctgttcagtaaatgtccgct

SEQ ID NO: 6099029 - DNA, 20 bp, Homo sapien
agcggacatttactgaacag

SEQ ID NO: 6099030 - DNA, 20 bp, Homo sapien
ctgttacaacgtctatctcg

SEQ ID NO: 6099031 - DNA, 20 bp, Homo sapien
cgagatagacgttgtaacag

SEQ ID NO: 6099032 - DNA, 20 bp, Homo sapien
ctgtggatacatcgttactg

SEQ ID NO: 6099033 - DNA, 20 bp, Homo sapien
cagtaacgatgtatccacag

SEQ ID NO: 6099034 - DNA, 20 bp, Homo sapien
ctgtgcatcctgtcgatacg

SEQ ID NO: 6099035 - DNA, 20 bp, Homo sapien
cgtatcgacaggatgcacag

SEQ ID NO: 6099036 - DNA, 20 bp, Homo sapien
ctgtgatagggtctgcctca

SEQ ID NO: 6099037 - DNA, 20 bp, Homo sapien
tgaggcagaccctatcacag

SEQ ID NO: 6099038 - DNA, 20 bp, Homo sapien
ctgtcgcatctgtagcagtc

SEQ ID NO: 6099039 - DNA, 20 bp, Homo sapien
gactgctacagatgcgacag

SEQ ID NO: 6099040 - DNA, 20 bp, Homo sapien
atgaactgcactgacgtagc

SEQ ID NO: 6099041 - DNA, 20 bp, Homo sapien
gctacgtcagtgcagttcat

SEQ ID NO: 6099042 - DNA, 20 bp, Homo sapien
gatctatctgtagtgagtgc

SEQ ID NO: 6099043 - DNA, 20 bp, Homo sapien
gcactcactacagatagatc

SEQ ID NO: 6099044 - DNA, 20 bp, Homo sapien
ctgtccgatgctctgatcta

SEQ ID NO: 6099045 - DNA, 20 bp, Homo sapien
tagatcagagcatcggacag

SEQ ID NO: 6099046 - DNA, 20 bp, Homo sapien
ctgtcatgtacggttagtcg

SEQ ID NO: 6099047 - DNA, 20 bp, Homo sapien
cgactaaccgtacatgacag

SEQ ID NO: 6099048 - DNA, 20 bp, Homo sapien
ctgtcacattatactcctgg

SEQ ID NO: 6099049 - DNA, 20 bp, Homo sapien
ccaggagtataatgtgacag

SEQ ID NO: 6099050 - DNA, 20 bp, Homo sapien
ctgtaactgtagcgtatgtg

SEQ ID NO: 6099051 - DNA, 20 bp, Homo sapien
cacatacgctacagttacag

SEQ ID NO: 6099052 - DNA, 20 bp, Homo sapien
ctgggtcgtgtaatcgctct

SEQ ID NO: 6099053 - DNA, 20 bp, Homo sapien
agagcgattacacgacccag

SEQ ID NO: 6099054 - DNA, 20 bp, Homo sapien
ctgggatagtctgtctacgt

SEQ ID NO: 6099055 - DNA, 20 bp, Homo sapien
acgtagacagactatcccag

SEQ ID NO: 6099056 - DNA, 20 bp, Homo sapien
ctgctccatgtcgcgtatgt

SEQ ID NO: 6099057 - DNA, 20 bp, Homo sapien
acatacgcgacatggagcag

SEQ ID NO: 6099058 - DNA, 20 bp, Homo sapien
ctgcggtgtcagtgatctct

SEQ ID NO: 6099059 - DNA, 20 bp, Homo sapien
agagatcactgacaccgcag

SEQ ID NO: 6099060 - DNA, 20 bp, Homo sapien
ctgcgacttaggataactgt

SEQ ID NO: 6099061 - DNA, 20 bp, Homo sapien
acagttatcctaagtcgcag

SEQ ID NO: 6099062 - DNA, 20 bp, Homo sapien
ctgcctgtgactcgtgtatc

SEQ ID NO: 6099063 - DNA, 20 bp, Homo sapien
gatacacgagtcacaggcag

SEQ ID NO: 6099064 - DNA, 20 bp, Homo sapien
atgaacatctatcgctcgct

SEQ ID NO: 6099065 - DNA, 20 bp, Homo sapien
agcgagcgatagatgttcat

SEQ ID NO: 6099066 - DNA, 20 bp, Homo sapien
ctgccgctgggtccaatata

SEQ ID NO: 6099067 - DNA, 20 bp, Homo sapien
tatattggacccagcggcag

SEQ ID NO: 6099068 - DNA, 20 bp, Homo sapien
ctgcattatagcggtgtagt

SEQ ID NO: 6099069 - DNA, 20 bp, Homo sapien
actacaccgctataatgcag

SEQ ID NO: 6099070 - DNA, 20 bp, Homo sapien
ctgcaattaactactctgcg

SEQ ID NO: 6099071 - DNA, 20 bp, Homo sapien
cgcagagtagttaattgcag

SEQ ID NO: 6099072 - DNA, 20 bp, Homo sapien
ctgatgcttaactcgtatgc

SEQ ID NO: 6099073 - DNA, 20 bp, Homo sapien
gcatacgagttaagcatcag

SEQ ID NO: 6099074 - DNA, 20 bp, Homo sapien
ctgatataggtcgtggctcc

SEQ ID NO: 6099075 - DNA, 20 bp, Homo sapien
ggagccacgacctatatcag

SEQ ID NO: 6099076 - DNA, 20 bp, Homo sapien
ctgatagtgctgtaagtcgc

SEQ ID NO: 6099077 - DNA, 20 bp, Homo sapien
gcgacttacagcactatcag

SEQ ID NO: 6099078 - DNA, 20 bp, Homo sapien
ctgagtgcttacgcctctga

SEQ ID NO: 6099079 - DNA, 20 bp, Homo sapien
tcagaggcgtaagcactcag

SEQ ID NO: 6099080 - DNA, 20 bp, Homo sapien
ctgagcgcgtatctgtgtac

SEQ ID NO: 6099081 - DNA, 20 bp, Homo sapien
gtacacagatacgcgctcag

SEQ ID NO: 6099082 - DNA, 20 bp, Homo sapien
ctgactaatcgtgtaggtgt

SEQ ID NO: 6099083 - DNA, 20 bp, Homo sapien
acacctacacgattagtcag

SEQ ID NO: 6099084 - DNA, 20 bp, Homo sapien
ctgacagctcgtgggtaact

SEQ ID NO: 6099085 - DNA, 20 bp, Homo sapien
agttacccacgagctgtcag

SEQ ID NO: 6099086 - DNA, 20 bp, Homo sapien
agcatcgctgagaggtccaa

SEQ ID NO: 6099087 - DNA, 20 bp, Homo sapien
ttggacctctcagcgatgct

SEQ ID NO: 6099088 - DNA, 20 bp, Homo sapien
ctgaaatgtcatgctagtcg

SEQ ID NO: 6099089 - DNA, 20 bp, Homo sapien
cgactagcatgacatttcag

SEQ ID NO: 6099090 - DNA, 20 bp, Homo sapien
ctcttatacgaagttaccgg

SEQ ID NO: 6099091 - DNA, 20 bp, Homo sapien
ccggtaacttcgtataagag

SEQ ID NO: 6099092 - DNA, 20 bp, Homo sapien
ctctgtgccatgatctctga

SEQ ID NO: 6099093 - DNA, 20 bp, Homo sapien
tcagagatcatggcacagag

SEQ ID NO: 6099094 - DNA, 20 bp, Homo sapien
ctctgtgaactgtcatcggt

SEQ ID NO: 6099095 - DNA, 20 bp, Homo sapien
accgatgacagttcacagag

SEQ ID NO: 6099096 - DNA, 20 bp, Homo sapien
ctctcttagcatagtgtcgg

SEQ ID NO: 6099097 - DNA, 20 bp, Homo sapien
ccgacactatgctaagagag

SEQ ID NO: 6099098 - DNA, 20 bp, Homo sapien
ctcggtggtgctcagtacat

SEQ ID NO: 6099099 - DNA, 20 bp, Homo sapien
atgtactgagcaccaccgag

SEQ ID NO: 6099100 - DNA, 20 bp, Homo sapien
ctcggcattaggctcgctat

SEQ ID NO: 6099101 - DNA, 20 bp, Homo sapien
atagcgagcctaatgccgag

SEQ ID NO: 6099102 - DNA, 20 bp, Homo sapien
ctcggatctgtcgaagtatg

SEQ ID NO: 6099103 - DNA, 20 bp, Homo sapien
catacttcgacagatccgag

SEQ ID NO: 6099104 - DNA, 20 bp, Homo sapien
ctcggagttacgatgccttc

SEQ ID NO: 6099105 - DNA, 20 bp, Homo sapien
gaaggcatcgtaactccgag

SEQ ID NO: 6099106 - DNA, 20 bp, Homo sapien
ctcgatattccacctaagtg

SEQ ID NO: 6099107 - DNA, 20 bp, Homo sapien
cacttaggtggaatatcgag

SEQ ID NO: 6099108 - DNA, 20 bp, Homo sapien
agcatccctgacgcgagtat

SEQ ID NO: 6099109 - DNA, 20 bp, Homo sapien
atactcgcgtcagggatgct

SEQ ID NO: 6099110 - DNA, 20 bp, Homo sapien
ctcattagtatcatcgtcgg

SEQ ID NO: 6099111 - DNA, 20 bp, Homo sapien
ccgacgatgatactaatgag

SEQ ID NO: 6099112 - DNA, 20 bp, Homo sapien
ctcatatagcgttacggtcg

SEQ ID NO: 6099113 - DNA, 20 bp, Homo sapien
cgaccgtaacgctatatgag

SEQ ID NO: 6099114 - DNA, 20 bp, Homo sapien
ctcagactgtatcccgtgga

SEQ ID NO: 6099115 - DNA, 20 bp, Homo sapien
tccacgggatacagtctgag

SEQ ID NO: 6099116 - DNA, 20 bp, Homo sapien
ctcactgtggagtcgtctat

SEQ ID NO: 6099117 - DNA, 20 bp, Homo sapien
atagacgactccacagtgag

SEQ ID NO: 6099118 - DNA, 20 bp, Homo sapien
ctcactaatcgtctgcggtg

SEQ ID NO: 6099119 - DNA, 20 bp, Homo sapien
caccgcagacgattagtgag

SEQ ID NO: 6099120 - DNA, 20 bp, Homo sapien
ctcacagatgattactaccg

SEQ ID NO: 6099121 - DNA, 20 bp, Homo sapien
cggtagtaatcatctgtgag

SEQ ID NO: 6099122 - DNA, 20 bp, Homo sapien
ctcaacttacgtctatcgag

SEQ ID NO: 6099123 - DNA, 20 bp, Homo sapien
ctcgatagacgtaagttgag

SEQ ID NO: 6099124 - DNA, 20 bp, Homo sapien
ctcaacagtgtatccggtgg

SEQ ID NO: 6099125 - DNA, 20 bp, Homo sapien
ccaccggatacactgttgag

SEQ ID NO: 6099126 - DNA, 20 bp, Homo sapien
ctcaaatatgatgtcacggc

SEQ ID NO: 6099127 - DNA, 20 bp, Homo sapien
gccgtgacatcatatttgag

SEQ ID NO: 6099128 - DNA, 20 bp, Homo sapien
ctatggctgagtatgtaacg

SEQ ID NO: 6099129 - DNA, 20 bp, Homo sapien
cgttacatactcagccatag

SEQ ID NO: 6099130 - DNA, 20 bp, Homo sapien
agcatatcgacatagctgcc

SEQ ID NO: 6099131 - DNA, 20 bp, Homo sapien
ggcagctatgtcgatatgct

SEQ ID NO: 6099132 - DNA, 20 bp, Homo sapien
ctatggcgtgctagtcgtct

SEQ ID NO: 6099133 - DNA, 20 bp, Homo sapien
agacgactagcacgccatag

SEQ ID NO: 6099134 - DNA, 20 bp, Homo sapien
ctatatgtcctaataccgcg

SEQ ID NO: 6099135 - DNA, 20 bp, Homo sapien
cgcggtattaggacatatag

SEQ ID NO: 6099136 - DNA, 20 bp, Homo sapien
ctagtgcatcctcgtggcat

SEQ ID NO: 6099137 - DNA, 20 bp, Homo sapien
atgccacgaggatgcactag

SEQ ID NO: 6099138 - DNA, 20 bp, Homo sapien
ctaggttagacagtcgtgta

SEQ ID NO: 6099139 - DNA, 20 bp, Homo sapien
tacacgactgtctaacctag

SEQ ID NO: 6099140 - DNA, 20 bp, Homo sapien
ctagggtgtatcgcctgtta

SEQ ID NO: 6099141 - DNA, 20 bp, Homo sapien
taacaggcgatacaccctag

SEQ ID NO: 6099142 - DNA, 20 bp, Homo sapien
ctagcagttagactacgtgg

SEQ ID NO: 6099143 - DNA, 20 bp, Homo sapien
ccacgtagtctaactgctag

SEQ ID NO: 6099144 - DNA, 20 bp, Homo sapien
ctagattcaccagacttacg

SEQ ID NO: 6099145 - DNA, 20 bp, Homo sapien
cgtaagtctggtgaatctag

SEQ ID NO: 6099146 - DNA, 20 bp, Homo sapien
ctagatgtgcgatggtcacc

SEQ ID NO: 6099147 - DNA, 20 bp, Homo sapien
ggtgaccatcgcacatctag

SEQ ID NO: 6099148 - DNA, 20 bp, Homo sapien
ctactgagttacactgagtc

SEQ ID NO: 6099149 - DNA, 20 bp, Homo sapien
gactcagtgtaactcagtag

SEQ ID NO: 6099150 - DNA, 20 bp, Homo sapien
ctaatctatggtgacggtgt

SEQ ID NO: 6099151 - DNA, 20 bp, Homo sapien
acaccgtcaccatagattag

SEQ ID NO: 6099152 - DNA, 20 bp, Homo sapien
gtgctacttgatctacatgg

SEQ ID NO: 6099153 - DNA, 20 bp, Homo sapien
ccatgtagatcaagtagcac

SEQ ID NO: 6099154 - DNA, 20 bp, Homo sapien
ctaatatctgatgactccgg

SEQ ID NO: 6099155 - DNA, 20 bp, Homo sapien
ccggagtcatcagatattag

SEQ ID NO: 6099156 - DNA, 20 bp, Homo sapien
ctaatacatcgtgatacggg

SEQ ID NO: 6099157 - DNA, 20 bp, Homo sapien
cccgtatcacgatgtattag

SEQ ID NO: 6099158 - DNA, 20 bp, Homo sapien
ctaagtgtgactgggtacat

SEQ ID NO: 6099159 - DNA, 20 bp, Homo sapien
atgtacccagtcacacttag

SEQ ID NO: 6099160 - DNA, 20 bp, Homo sapien
ctaagtaatctggtccgcga

SEQ ID NO: 6099161 - DNA, 20 bp, Homo sapien
tcgcggaccagattacttag

SEQ ID NO: 6099162 - DNA, 20 bp, Homo sapien
ctaagatgtacggtgatcgt

SEQ ID NO: 6099163 - DNA, 20 bp, Homo sapien
acgatcaccgtacatcttag

SEQ ID NO: 6099164 - DNA, 20 bp, Homo sapien
ctaacgaatctgggacgtgc

SEQ ID NO: 6099165 - DNA, 20 bp, Homo sapien
gcacgtcccagattcgttag

SEQ ID NO: 6099166 - DNA, 20 bp, Homo sapien
cgttcctgactctgtacgaa

SEQ ID NO: 6099167 - DNA, 20 bp, Homo sapien
ttcgtacagagtcaggaacg

SEQ ID NO: 6099168 - DNA, 20 bp, Homo sapien
cgttcctaaagctgagtctg

SEQ ID NO: 6099169 - DNA, 20 bp, Homo sapien
cagactcagctttaggaacg

SEQ ID NO: 6099170 - DNA, 20 bp, Homo sapien
cgttatcaacctgggtccga

SEQ ID NO: 6099171 - DNA, 20 bp, Homo sapien
tcggacccaggttgataacg

SEQ ID NO: 6099172 - DNA, 20 bp, Homo sapien
cgttagatcagattaccgcg

SEQ ID NO: 6099173 - DNA, 20 bp, Homo sapien
cgcggtaatctgatctaacg

SEQ ID NO: 6099174 - DNA, 20 bp, Homo sapien
ggactgattcgagctatctc

SEQ ID NO: 6099175 - DNA, 20 bp, Homo sapien
gagatagctcgaatcagtcc

SEQ ID NO: 6099176 - DNA, 20 bp, Homo sapien
cgttaagctagattacgagg

SEQ ID NO: 6099177 - DNA, 20 bp, Homo sapien
cctcgtaatctagcttaacg

SEQ ID NO: 6099178 - DNA, 20 bp, Homo sapien
cgtgttcaaagcgcgtagct

SEQ ID NO: 6099179 - DNA, 20 bp, Homo sapien
agctacgcgctttgaacacg

SEQ ID NO: 6099180 - DNA, 20 bp, Homo sapien
cgtgtagtgacgtgctatct

SEQ ID NO: 6099181 - DNA, 20 bp, Homo sapien
agatagcacgtcactacacg

SEQ ID NO: 6099182 - DNA, 20 bp, Homo sapien
cgtgcgtatcgtctcctaga

SEQ ID NO: 6099183 - DNA, 20 bp, Homo sapien
tctaggagacgatacgcacg

SEQ ID NO: 6099184 - DNA, 20 bp, Homo sapien
cgtgacacttaatcgctcgt

SEQ ID NO: 6099185 - DNA, 20 bp, Homo sapien
acgagcgattaagtgtcacg

SEQ ID NO: 6099186 - DNA, 20 bp, Homo sapien
cgtgacaatgtactatggag

SEQ ID NO: 6099187 - DNA, 20 bp, Homo sapien
ctccatagtacattgtcacg

SEQ ID NO: 6099188 - DNA, 20 bp, Homo sapien
cgtgaacatgcaggtcagtc

SEQ ID NO: 6099189 - DNA, 20 bp, Homo sapien
gactgacctgcatgttcacg

SEQ ID NO: 6099190 - DNA, 20 bp, Homo sapien
cgtcttaacgtatctgcgtg

SEQ ID NO: 6099191 - DNA, 20 bp, Homo sapien
cacgcagatacgttaagacg

SEQ ID NO: 6099192 - DNA, 20 bp, Homo sapien
cgtcctcgtctcgaatatag

SEQ ID NO: 6099193 - DNA, 20 bp, Homo sapien
ctatattcgagacgaggacg

SEQ ID NO: 6099194 - DNA, 20 bp, Homo sapien
cgtccgtctagctggatcaa

SEQ ID NO: 6099195 - DNA, 20 bp, Homo sapien
ttgatccagctagacggacg

SEQ ID NO: 6099196 - DNA, 20 bp, Homo sapien
gacggcattcagagtacgct

SEQ ID NO: 6099197 - DNA, 20 bp, Homo sapien
agcgtactctgaatgccgtc

SEQ ID NO: 6099198 - DNA, 20 bp, Homo sapien
cgtccgcctggatgatatga

SEQ ID NO: 6099199 - DNA, 20 bp, Homo sapien
tcatatcatccaggcggacg

SEQ ID NO: 6099200 - DNA, 20 bp, Homo sapien
cgtccctgtaatgctagtca

SEQ ID NO: 6099201 - DNA, 20 bp, Homo sapien
tgactagcattacagggacg

SEQ ID NO: 6099202 - DNA, 20 bp, Homo sapien
cgtccctatcgtctatgtag

SEQ ID NO: 6099203 - DNA, 20 bp, Homo sapien
ctacatagacgatagggacg

SEQ ID NO: 6099204 - DNA, 20 bp, Homo sapien
cgtccatgtgactggctgat

SEQ ID NO: 6099205 - DNA, 20 bp, Homo sapien
atcagccagtcacatggacg

SEQ ID NO: 6099206 - DNA, 20 bp, Homo sapien
cgtccagttagagacatgct

SEQ ID NO: 6099207 - DNA, 20 bp, Homo sapien
agcatgtctctaactggacg

SEQ ID NO: 6099208 - DNA, 20 bp, Homo sapien
cgtcatctgtgaagagtgct

SEQ ID NO: 6099209 - DNA, 20 bp, Homo sapien
agcactcttcacagatgacg

SEQ ID NO: 6099210 - DNA, 20 bp, Homo sapien
cgtcaatatgattccacacg

SEQ ID NO: 6099211 - DNA, 20 bp, Homo sapien
cgtgtggaatcatattgacg

SEQ ID NO: 6099212 - DNA, 20 bp, Homo sapien
cgtatgtccaatgctgcgga

SEQ ID NO: 6099213 - DNA, 20 bp, Homo sapien
tccgcagcattggacatacg

SEQ ID NO: 6099214 - DNA, 20 bp, Homo sapien
cgtatcgtgctacctgctag

SEQ ID NO: 6099215 - DNA, 20 bp, Homo sapien
ctagcaggtagcacgatacg

SEQ ID NO: 6099216 - DNA, 20 bp, Homo sapien
cgtataactggtactaaggg

SEQ ID NO: 6099217 - DNA, 20 bp, Homo sapien
cccttagtaccagttatacg

SEQ ID NO: 6099218 - DNA, 20 bp, Homo sapien
ctgtcgcgtcatgtccatta

SEQ ID NO: 6099219 - DNA, 20 bp, Homo sapien
taatggacatgacgcgacag

SEQ ID NO: 6099220 - DNA, 20 bp, Homo sapien
cgtagtgctgctaatagtct

SEQ ID NO: 6099221 - DNA, 20 bp, Homo sapien
agactattagcagcactacg

SEQ ID NO: 6099222 - DNA, 20 bp, Homo sapien
cgtaggcttaacgctgctga

SEQ ID NO: 6099223 - DNA, 20 bp, Homo sapien
tcagcagcgttaagcctacg

SEQ ID NO: 6099224 - DNA, 20 bp, Homo sapien
cgtagacatgctagagtcgt

SEQ ID NO: 6099225 - DNA, 20 bp, Homo sapien
acgactctagcatgtctacg

SEQ ID NO: 6099226 - DNA, 20 bp, Homo sapien
cgtacttcaccacagttgag

SEQ ID NO: 6099227 - DNA, 20 bp, Homo sapien
ctcaactgtggtgaagtacg

SEQ ID NO: 6099228 - DNA, 20 bp, Homo sapien
cgtactattagagccgatgt

SEQ ID NO: 6099229 - DNA, 20 bp, Homo sapien
acatcggctctaatagtacg

SEQ ID NO: 6099230 - DNA, 20 bp, Homo sapien
cgtacctgtaggatgctctt

SEQ ID NO: 6099231 - DNA, 20 bp, Homo sapien
aagagcatcctacaggtacg

SEQ ID NO: 6099232 - DNA, 20 bp, Homo sapien
cggtgtcgtaacctctctta

SEQ ID NO: 6099233 - DNA, 20 bp, Homo sapien
taagagaggttacgacaccg

SEQ ID NO: 6099234 - DNA, 20 bp, Homo sapien
cggtgtccgtcccgtataat

SEQ ID NO: 6099235 - DNA, 20 bp, Homo sapien
attatacgggacggacaccg

SEQ ID NO: 6099236 - DNA, 20 bp, Homo sapien
cggtcaatgtcagtacggat

SEQ ID NO: 6099237 - DNA, 20 bp, Homo sapien
atccgtactgacattgaccg

SEQ ID NO: 6099238 - DNA, 20 bp, Homo sapien
cggtcaactggtgaagactc

SEQ ID NO: 6099239 - DNA, 20 bp, Homo sapien
gagtcttcaccagttgaccg

SEQ ID NO: 6099240 - DNA, 20 bp, Homo sapien
ctgtcccgtgtgctgagata

SEQ ID NO: 6099241 - DNA, 20 bp, Homo sapien
tatctcagcacacgggacag

SEQ ID NO: 6099242 - DNA, 20 bp, Homo sapien
cggtatctgctccgtcatag

SEQ ID NO: 6099243 - DNA, 20 bp, Homo sapien
ctatgacggagcagataccg

SEQ ID NO: 6099244 - DNA, 20 bp, Homo sapien
cgggctaattccacacagtt

SEQ ID NO: 6099245 - DNA, 20 bp, Homo sapien
aactgtgtggaattagcccg

SEQ ID NO: 6099246 - DNA, 20 bp, Homo sapien
cgggcctatgtacgctaatc

SEQ ID NO: 6099247 - DNA, 20 bp, Homo sapien
gattagcgtacataggcccg

SEQ ID NO: 6099248 - DNA, 20 bp, Homo sapien
cggctatgtacgacgtgcta

SEQ ID NO: 6099249 - DNA, 20 bp, Homo sapien
tagcacgtcgtacatagccg

SEQ ID NO: 6099250 - DNA, 20 bp, Homo sapien
cggcggcttaataactcgtt

SEQ ID NO: 6099251 - DNA, 20 bp, Homo sapien
aacgagttattaagccgccg

SEQ ID NO: 6099252 - DNA, 20 bp, Homo sapien
cggcgcggttacaatgcaat

SEQ ID NO: 6099253 - DNA, 20 bp, Homo sapien
attgcattgtaaccgcgccg

SEQ ID NO: 6099254 - DNA, 20 bp, Homo sapien
cggattaggaccctgtgact

SEQ ID NO: 6099255 - DNA, 20 bp, Homo sapien
agtcacagggtcctaatccg

SEQ ID NO: 6099256 - DNA, 20 bp, Homo sapien
cggatcgttacaagggtctc

SEQ ID NO: 6099257 - DNA, 20 bp, Homo sapien
gagacccttgtaacgatccg

SEQ ID NO: 6099258 - DNA, 20 bp, Homo sapien
cggacattagcacccgtgta

SEQ ID NO: 6099259 - DNA, 20 bp, Homo sapien
tacacgggtgctaatgtccg

SEQ ID NO: 6099260 - DNA, 20 bp, Homo sapien
cgctgtcatcgacgttacta

SEQ ID NO: 6099261 - DNA, 20 bp, Homo sapien
tagtaacgtcgatgacagcg

SEQ ID NO: 6099262 - DNA, 20 bp, Homo sapien
cggcgtgatgatcgctactt

SEQ ID NO: 6099263 - DNA, 20 bp, Homo sapien
aagtagcgatcatcacgccg

SEQ ID NO: 6099264 - DNA, 20 bp, Homo sapien
gagaaagattcactcagctc

SEQ ID NO: 6099265 - DNA, 20 bp, Homo sapien
gagctgagtgaatctttctc

SEQ ID NO: 6099266 - DNA, 20 bp, Homo sapien
cgctcttataccactgtaga

SEQ ID NO: 6099267 - DNA, 20 bp, Homo sapien
tctacagtggtataagagcg

SEQ ID NO: 6099268 - DNA, 20 bp, Homo sapien
cgctctgtccagtcatgtta

SEQ ID NO: 6099269 - DNA, 20 bp, Homo sapien
taacatgactggacagagcg

SEQ ID NO: 6099270 - DNA, 20 bp, Homo sapien
cgctcgttaaagtacggtga

SEQ ID NO: 6099271 - DNA, 20 bp, Homo sapien
tcaccgtactttaacgagcg

SEQ ID NO: 6099272 - DNA, 20 bp, Homo sapien
cgctatgtccaagtctctat

SEQ ID NO: 6099273 - DNA, 20 bp, Homo sapien
atagagacttggacatagcg

SEQ ID NO: 6099274 - DNA, 20 bp, Homo sapien
cgctatatgtagtaagcctg

SEQ ID NO: 6099275 - DNA, 20 bp, Homo sapien
caggcttactacatatagcg

SEQ ID NO: 6099276 - DNA, 20 bp, Homo sapien
cgcgtcgatctaggtgacta

SEQ ID NO: 6099277 - DNA, 20 bp, Homo sapien
tagtcacctagatcgacgcg

SEQ ID NO: 6099278 - DNA, 20 bp, Homo sapien
cgcgtatctctctctagtag

SEQ ID NO: 6099279 - DNA, 20 bp, Homo sapien
ctactagagagagatacgcg

SEQ ID NO: 6099280 - DNA, 20 bp, Homo sapien
cgcgtacctgctgtttgcat

SEQ ID NO: 6099281 - DNA, 20 bp, Homo sapien
atgcaaacagcaggtacgcg

SEQ ID NO: 6099282 - DNA, 20 bp, Homo sapien
cgcggcgtgtctcagaatat

SEQ ID NO: 6099283 - DNA, 20 bp, Homo sapien
atattctgagacacgccgcg

SEQ ID NO: 6099284 - DNA, 20 bp, Homo sapien
cgcctcattaacgtcagtgg

SEQ ID NO: 6099285 - DNA, 20 bp, Homo sapien
ccactgacgttaatgaggcg

SEQ ID NO: 6099286 - DNA, 20 bp, Homo sapien
cggcgtactgctcctatatg

SEQ ID NO: 6099287 - DNA, 20 bp, Homo sapien
catataggagcagtacgccg

SEQ ID NO: 6099288 - DNA, 20 bp, Homo sapien
cgcctatctggtaataactg

SEQ ID NO: 6099289 - DNA, 20 bp, Homo sapien
cagttattaccagataggcg

SEQ ID NO: 6099290 - DNA, 20 bp, Homo sapien
cgccggttaagccgctatta

SEQ ID NO: 6099291 - DNA, 20 bp, Homo sapien
taatagcggcttaaccggcg

SEQ ID NO: 6099292 - DNA, 20 bp, Homo sapien
cgccattagccacgtagttt

SEQ ID NO: 6099293 - DNA, 20 bp, Homo sapien
aaactacgtggctaatggcg

SEQ ID NO: 6099294 - DNA, 20 bp, Homo sapien
cgccagagttatgtttgagt

SEQ ID NO: 6099295 - DNA, 20 bp, Homo sapien
actcaaacataactctggcg

SEQ ID NO: 6099296 - DNA, 20 bp, Homo sapien
cgcatcaatggtacgagtgt

SEQ ID NO: 6099297 - DNA, 20 bp, Homo sapien
acactcgtaccattgatgcg

SEQ ID NO: 6099298 - DNA, 20 bp, Homo sapien
cgcatatctacgtctctagg

SEQ ID NO: 6099299 - DNA, 20 bp, Homo sapien
cctagagacgtagatatgcg

SEQ ID NO: 6099300 - DNA, 20 bp, Homo sapien
cgcatactggtccacatata

SEQ ID NO: 6099301 - DNA, 20 bp, Homo sapien
tatatgtggaccagtatgcg

SEQ ID NO: 6099302 - DNA, 20 bp, Homo sapien
cgcataaatgtcactcgctg

SEQ ID NO: 6099303 - DNA, 20 bp, Homo sapien
cagcgagtgacatttatgcg

SEQ ID NO: 6099304 - DNA, 20 bp, Homo sapien
cgcagtgtgctcggctataa

SEQ ID NO: 6099305 - DNA, 20 bp, Homo sapien
ttatagccgagcacactgcg

SEQ ID NO: 6099306 - DNA, 20 bp, Homo sapien
cgcagtcttaaatacggtgt

SEQ ID NO: 6099307 - DNA, 20 bp, Homo sapien
acaccgtatttaagactgcg

SEQ ID NO: 6099308 - DNA, 20 bp, Homo sapien
cggcgatctgctgccatata

SEQ ID NO: 6099309 - DNA, 20 bp, Homo sapien
tatatggcagcagatcgccg

SEQ ID NO: 6099310 - DNA, 20 bp, Homo sapien
cgcacttcaacaatcgtgta

SEQ ID NO: 6099311 - DNA, 20 bp, Homo sapien
tacacgattgttgaagtgcg

SEQ ID NO: 6099312 - DNA, 20 bp, Homo sapien
cgcactcgtgtgagatagtc

SEQ ID NO: 6099313 - DNA, 20 bp, Homo sapien
gactatctcacacgagtgcg

SEQ ID NO: 6099314 - DNA, 20 bp, Homo sapien
cgcactcattaaactgatgc

SEQ ID NO: 6099315 - DNA, 20 bp, Homo sapien
gcatcagtttaatgagtgcg

SEQ ID NO: 6099316 - DNA, 20 bp, Homo sapien
cgattcgagaacgtgactgc

SEQ ID NO: 6099317 - DNA, 20 bp, Homo sapien
gcagtcacgttctcgaatcg

SEQ ID NO: 6099318 - DNA, 20 bp, Homo sapien
cgatgcagtgactcgtccta

SEQ ID NO: 6099319 - DNA, 20 bp, Homo sapien
taggacgagtcactgcatcg

SEQ ID NO: 6099320 - DNA, 20 bp, Homo sapien
cgatctcatctggctacggt

SEQ ID NO: 6099321 - DNA, 20 bp, Homo sapien
accgtagccagatgagatcg

SEQ ID NO: 6099322 - DNA, 20 bp, Homo sapien
cgatctattaaatccggtgc

SEQ ID NO: 6099323 - DNA, 20 bp, Homo sapien
gcaccggatttaatagatcg

SEQ ID NO: 6099324 - DNA, 20 bp, Homo sapien
cgatataatgctcgatacgg

SEQ ID NO: 6099325 - DNA, 20 bp, Homo sapien
ccgtatcgagcattatatcg

SEQ ID NO: 6099326 - DNA, 20 bp, Homo sapien
cgatactatgtagcatcagg

SEQ ID NO: 6099327 - DNA, 20 bp, Homo sapien
cctgatgctacatagtatcg

SEQ ID NO: 6099328 - DNA, 20 bp, Homo sapien
cgataatgtcacagtctctg

SEQ ID NO: 6099329 - DNA, 20 bp, Homo sapien
cagagactgtgacattatcg

SEQ ID NO: 6099330 - DNA, 20 bp, Homo sapien
ccaatcgtgatctagcgtga

SEQ ID NO: 6099331 - DNA, 20 bp, Homo sapien
tcacgctagatcacgattgg

SEQ ID NO: 6099332 - DNA, 20 bp, Homo sapien
cgagtgcatgagctgtcttt

SEQ ID NO: 6099333 - DNA, 20 bp, Homo sapien
aaagacagctcatgcactcg

SEQ ID NO: 6099334 - DNA, 20 bp, Homo sapien
cgagcctgtctagccatagt

SEQ ID NO: 6099335 - DNA, 20 bp, Homo sapien
actatggctagacaggctcg

SEQ ID NO: 6099336 - DNA, 20 bp, Homo sapien
cgagagattaacgcctgtgt

SEQ ID NO: 6099337 - DNA, 20 bp, Homo sapien
acacaggcgttaatctctcg

SEQ ID NO: 6099338 - DNA, 20 bp, Homo sapien
cgactgtaggtgcgtaactc

SEQ ID NO: 6099339 - DNA, 20 bp, Homo sapien
gagttacgcacctacagtcg

SEQ ID NO: 6099340 - DNA, 20 bp, Homo sapien
cgactacatgataggtatgg

SEQ ID NO: 6099341 - DNA, 20 bp, Homo sapien
ccatacctatcatgtagtcg

SEQ ID NO: 6099342 - DNA, 20 bp, Homo sapien
cgacgctggtagcagtctat

SEQ ID NO: 6099343 - DNA, 20 bp, Homo sapien
atagactgctaccagcgtcg

SEQ ID NO: 6099344 - DNA, 20 bp, Homo sapien
cgacgccctctgatagtaga

SEQ ID NO: 6099345 - DNA, 20 bp, Homo sapien
tctactatcagagggcgtcg

SEQ ID NO: 6099346 - DNA, 20 bp, Homo sapien
cgacctaatgctacggtatc

SEQ ID NO: 6099347 - DNA, 20 bp, Homo sapien
gataccgtagcattaggtcg

SEQ ID NO: 6099348 - DNA, 20 bp, Homo sapien
cgaccggatgtaggcatact

SEQ ID NO: 6099349 - DNA, 20 bp, Homo sapien
agtatgcctacatccggtcg

SEQ ID NO: 6099350 - DNA, 20 bp, Homo sapien
cgacagctctcgctagtagt

SEQ ID NO: 6099351 - DNA, 20 bp, Homo sapien
actactagcgagagctgtcg

SEQ ID NO: 6099352 - DNA, 20 bp, Homo sapien
agcatacatatactcgccgt

SEQ ID NO: 6099353 - DNA, 20 bp, Homo sapien
acggcgagtatatgtatgct

SEQ ID NO: 6099354 - DNA, 20 bp, Homo sapien
cgacacttaacgtactgcga

SEQ ID NO: 6099355 - DNA, 20 bp, Homo sapien
tcgcagtacgttaagtgtcg

SEQ ID NO: 6099356 - DNA, 20 bp, Homo sapien
cgacaacgtcctgcgtagat

SEQ ID NO: 6099357 - DNA, 20 bp, Homo sapien
atctacgcaggacgttgtcg

SEQ ID NO: 6099358 - DNA, 20 bp, Homo sapien
cgaatgatgcctatctagtc

SEQ ID NO: 6099359 - DNA, 20 bp, Homo sapien
gactagataggcatcattcg

SEQ ID NO: 6099360 - DNA, 20 bp, Homo sapien
cgaatcttaaatcacgtccg

SEQ ID NO: 6099361 - DNA, 20 bp, Homo sapien
cggacgtgatttaagattcg

SEQ ID NO: 6099362 - DNA, 20 bp, Homo sapien
cgaacgtctgctcagtagtg

SEQ ID NO: 6099363 - DNA, 20 bp, Homo sapien
cactactgagcagacgttcg

SEQ ID NO: 6099364 - DNA, 20 bp, Homo sapien
cgaaccgattaagcgggtct

SEQ ID NO: 6099365 - DNA, 20 bp, Homo sapien
agacccgcttaatcggttcg

SEQ ID NO: 6099366 - DNA, 20 bp, Homo sapien
cgaaattaccagcactgcgg

SEQ ID NO: 6099367 - DNA, 20 bp, Homo sapien
ccgcagtgctggtaatttcg

SEQ ID NO: 6099368 - DNA, 20 bp, Homo sapien
ccttatgcgactctatatgc

SEQ ID NO: 6099369 - DNA, 20 bp, Homo sapien
gcatatagagtcgcataagg

SEQ ID NO: 6099370 - DNA, 20 bp, Homo sapien
cctgtctgcaactggtcgat

SEQ ID NO: 6099371 - DNA, 20 bp, Homo sapien
atcgaccagttgcagacagg

SEQ ID NO: 6099372 - DNA, 20 bp, Homo sapien
cctggtacacgatgcgttta

SEQ ID NO: 6099373 - DNA, 20 bp, Homo sapien
taaacgcatcgtgtaccagg

SEQ ID NO: 6099374 - DNA, 20 bp, Homo sapien
tatagttattgacgctgcgg

SEQ ID NO: 6099375 - DNA, 20 bp, Homo sapien
ccgcagcgtcaataactata

SEQ ID NO: 6099376 - DNA, 20 bp, Homo sapien
cctgcgtctagcgtcgtata

SEQ ID NO: 6099377 - DNA, 20 bp, Homo sapien
tatacgacgctagacgcagg

SEQ ID NO: 6099378 - DNA, 20 bp, Homo sapien
cctgcgtatcgagcgtcata

SEQ ID NO: 6099379 - DNA, 20 bp, Homo sapien
tatgacgctcgatacgcagg

SEQ ID NO: 6099380 - DNA, 20 bp, Homo sapien
cctgcggatcgtgtagacta

SEQ ID NO: 6099381 - DNA, 20 bp, Homo sapien
tagtctacacgatccgcagg

SEQ ID NO: 6099382 - DNA, 20 bp, Homo sapien
cctctggagatgcgtgacaa

SEQ ID NO: 6099383 - DNA, 20 bp, Homo sapien
ttgtcacgcatctccagagg

SEQ ID NO: 6099384 - DNA, 20 bp, Homo sapien
cctctcagtcgtgtcaggat

SEQ ID NO: 6099385 - DNA, 20 bp, Homo sapien
atcctgacacgactgagagg

SEQ ID NO: 6099386 - DNA, 20 bp, Homo sapien
cctcgggtggtactcgatat

SEQ ID NO: 6099387 - DNA, 20 bp, Homo sapien
atatcgagtaccacccgagg

SEQ ID NO: 6099388 - DNA, 20 bp, Homo sapien
cctcggactggatcagctat

SEQ ID NO: 6099389 - DNA, 20 bp, Homo sapien
atagctgatccagtccgagg

SEQ ID NO: 6099390 - DNA, 20 bp, Homo sapien
cctcagatgggtcccgtaaa

SEQ ID NO: 6099391 - DNA, 20 bp, Homo sapien
tttacgggacccatctgagg

SEQ ID NO: 6099392 - DNA, 20 bp, Homo sapien
cctcactatggagctaggtg

SEQ ID NO: 6099393 - DNA, 20 bp, Homo sapien
cacctagctccatagtgagg

SEQ ID NO: 6099394 - DNA, 20 bp, Homo sapien
cctatgcagcgatgtcacta

SEQ ID NO: 6099395 - DNA, 20 bp, Homo sapien
tagtgacatcgctgcatagg

SEQ ID NO: 6099396 - DNA, 20 bp, Homo sapien
tatagcgcgttagttgcgat

SEQ ID NO: 6099397 - DNA, 20 bp, Homo sapien
atcgcaactaacgcgctata

SEQ ID NO: 6099398 - DNA, 20 bp, Homo sapien
cctatcgctctatatctggg

SEQ ID NO: 6099399 - DNA, 20 bp, Homo sapien
cccagatatagagcgatagg

SEQ ID NO: 6099400 - DNA, 20 bp, Homo sapien
cctatattcaacgccgtgat

SEQ ID NO: 6099401 - DNA, 20 bp, Homo sapien
atcacggcgttgaatatagg

SEQ ID NO: 6099402 - DNA, 20 bp, Homo sapien
cctagtgtgacggcctgata

SEQ ID NO: 6099403 - DNA, 20 bp, Homo sapien
tatcaggccgtcacactagg

SEQ ID NO: 6099404 - DNA, 20 bp, Homo sapien
cctagattaccaatactggc

SEQ ID NO: 6099405 - DNA, 20 bp, Homo sapien
gccagtattggtaatctagg

SEQ ID NO: 6099406 - DNA, 20 bp, Homo sapien
cctacctatgatcgctgagg

SEQ ID NO: 6099407 - DNA, 20 bp, Homo sapien
cctcagcgatcataggtagg

SEQ ID NO: 6099408 - DNA, 20 bp, Homo sapien
cctaccgatgtactagacta

SEQ ID NO: 6099409 - DNA, 20 bp, Homo sapien
tagtctagtacatcggtagg

SEQ ID NO: 6099410 - DNA, 20 bp, Homo sapien
cctaatagtcgtgagtcatg

SEQ ID NO: 6099411 - DNA, 20 bp, Homo sapien
catgactcacgactattagg

SEQ ID NO: 6099412 - DNA, 20 bp, Homo sapien
cctaaccttaacgactagag

SEQ ID NO: 6099413 - DNA, 20 bp, Homo sapien
ctctagtcgttaaggttagg

SEQ ID NO: 6099414 - DNA, 20 bp, Homo sapien
cctaaatgtaccggatcgtt

SEQ ID NO: 6099415 - DNA, 20 bp, Homo sapien
aacgatccggtacatttagg

SEQ ID NO: 6099416 - DNA, 20 bp, Homo sapien
ccgtgtgtgcagagcctatt

SEQ ID NO: 6099417 - DNA, 20 bp, Homo sapien
aataggctctgcacacacgg

SEQ ID NO: 6099418 - DNA, 20 bp, Homo sapien
gtgcgtagttctgtcatagc

SEQ ID NO: 6099419 - DNA, 20 bp, Homo sapien
gctatgacagaactacgcac

SEQ ID NO: 6099420 - DNA, 20 bp, Homo sapien
ccgtctgctgcaacgtatgt

SEQ ID NO: 6099421 - DNA, 20 bp, Homo sapien
acatacgttgcagcagacgg

SEQ ID NO: 6099422 - DNA, 20 bp, Homo sapien
ccgtcgttaagcccgattat

SEQ ID NO: 6099423 - DNA, 20 bp, Homo sapien
ataatcgggcttaacgacgg

SEQ ID NO: 6099424 - DNA, 20 bp, Homo sapien
ccgtcgtgtcgaacatgcta

SEQ ID NO: 6099425 - DNA, 20 bp, Homo sapien
tagcatgttcgacacgacgg

SEQ ID NO: 6099426 - DNA, 20 bp, Homo sapien
ccgtatgatctcagtcgcta

SEQ ID NO: 6099427 - DNA, 20 bp, Homo sapien
tagcgactgagatcatacgg

SEQ ID NO: 6099428 - DNA, 20 bp, Homo sapien
ccgtagtatctgcgatgcga

SEQ ID NO: 6099429 - DNA, 20 bp, Homo sapien
tcgcatcgcagatactacgg

SEQ ID NO: 6099430 - DNA, 20 bp, Homo sapien
ccgggttcaaacactgtact

SEQ ID NO: 6099431 - DNA, 20 bp, Homo sapien
agtacagtgtttgaacccgg

SEQ ID NO: 6099432 - DNA, 20 bp, Homo sapien
ccgctgcatctactataaga

SEQ ID NO: 6099433 - DNA, 20 bp, Homo sapien
tcttatagtagatgcagcgg

SEQ ID NO: 6099434 - DNA, 20 bp, Homo sapien
ccgctagttagaaagctcgg

SEQ ID NO: 6099435 - DNA, 20 bp, Homo sapien
ccgagctttctaactagcgg

SEQ ID NO: 6099436 - DNA, 20 bp, Homo sapien
ccgcgtgtgacatgagtcta

SEQ ID NO: 6099437 - DNA, 20 bp, Homo sapien
tagactcatgtcacacgcgg

SEQ ID NO: 6099438 - DNA, 20 bp, Homo sapien
ccgatcaatgagtctagtgt

SEQ ID NO: 6099439 - DNA, 20 bp, Homo sapien
acactagactcattgatcgg

SEQ ID NO: 6099440 - DNA, 20 bp, Homo sapien
gacctatatgtcgtgagtgt

SEQ ID NO: 6099441 - DNA, 20 bp, Homo sapien
acactcacgacatataggtc

SEQ ID NO: 6099442 - DNA, 20 bp, Homo sapien
ccgatacttaaagcgtagtg

SEQ ID NO: 6099443 - DNA, 20 bp, Homo sapien
cactacgctttaagtatcgg

SEQ ID NO: 6099444 - DNA, 20 bp, Homo sapien
ccgagtgctaggtgaccaat

SEQ ID NO: 6099445 - DNA, 20 bp, Homo sapien
attggtcacctagcactcgg

SEQ ID NO: 6099446 - DNA, 20 bp, Homo sapien
ccgagtcatcgtgagtagta

SEQ ID NO: 6099447 - DNA, 20 bp, Homo sapien
tactactcacgatgactcgg

SEQ ID NO: 6099448 - DNA, 20 bp, Homo sapien
ccgaggccgtactcatatag

SEQ ID NO: 6099449 - DNA, 20 bp, Homo sapien
ctatatgagtacggcctcgg

SEQ ID NO: 6099450 - DNA, 20 bp, Homo sapien
ccgagatgtaccgctatcgt

SEQ ID NO: 6099451 - DNA, 20 bp, Homo sapien
acgatagcggtacatctcgg

SEQ ID NO: 6099452 - DNA, 20 bp, Homo sapien
ccgacgtgtccacataggtt

SEQ ID NO: 6099453 - DNA, 20 bp, Homo sapien
aacctatgtggacacgtcgg

SEQ ID NO: 6099454 - DNA, 20 bp, Homo sapien
ccgacccttaatcgaatatg

SEQ ID NO: 6099455 - DNA, 20 bp, Homo sapien
catattcgattaagggtcgg

SEQ ID NO: 6099456 - DNA, 20 bp, Homo sapien
ccgaatgatcgtcagtgcgt

SEQ ID NO: 6099457 - DNA, 20 bp, Homo sapien
acgcactgacgatcattcgg

SEQ ID NO: 6099458 - DNA, 20 bp, Homo sapien
ccgaacctgcgtaactattg

SEQ ID NO: 6099459 - DNA, 20 bp, Homo sapien
caatagttacgcaggttcgg

SEQ ID NO: 6099460 - DNA, 20 bp, Homo sapien
ccctgtaatctataagtcgg

SEQ ID NO: 6099461 - DNA, 20 bp, Homo sapien
ccgacttatagattacaggg

SEQ ID NO: 6099462 - DNA, 20 bp, Homo sapien
gacctaactgtgatcgtatg

SEQ ID NO: 6099463 - DNA, 20 bp, Homo sapien
catacgatcacagttaggtc

SEQ ID NO: 6099464 - DNA, 20 bp, Homo sapien
ccctcgtatgagatagtatg

SEQ ID NO: 6099465 - DNA, 20 bp, Homo sapien
catactatctcatacgaggg

SEQ ID NO: 6099466 - DNA, 20 bp, Homo sapien
ccctcgctggagatcgaata

SEQ ID NO: 6099467 - DNA, 20 bp, Homo sapien
tattcgatctccagcgaggg

SEQ ID NO: 6099468 - DNA, 20 bp, Homo sapien
ccctcatatcgactggtagt

SEQ ID NO: 6099469 - DNA, 20 bp, Homo sapien
actaccagtcgatatgaggg

SEQ ID NO: 6099470 - DNA, 20 bp, Homo sapien
ccctatgtaacgtactctag

SEQ ID NO: 6099471 - DNA, 20 bp, Homo sapien
ctagagtacgttacataggg

SEQ ID NO: 6099472 - DNA, 20 bp, Homo sapien
cccgttacaaataggtgtct

SEQ ID NO: 6099473 - DNA, 20 bp, Homo sapien
agacacctatttgtaacggg

SEQ ID NO: 6099474 - DNA, 20 bp, Homo sapien
cccgtattaccaactatgag

SEQ ID NO: 6099475 - DNA, 20 bp, Homo sapien
ctcatagttggtaatacggg

SEQ ID NO: 6099476 - DNA, 20 bp, Homo sapien
cccgtatggatagggctcta

SEQ ID NO: 6099477 - DNA, 20 bp, Homo sapien
tagagccctatccatacggg

SEQ ID NO: 6099478 - DNA, 20 bp, Homo sapien
cccggacatggacgttaagt

SEQ ID NO: 6099479 - DNA, 20 bp, Homo sapien
acttaacgtccatgtccggg

SEQ ID NO: 6099480 - DNA, 20 bp, Homo sapien
cccatatagtcgcctaaggt

SEQ ID NO: 6099481 - DNA, 20 bp, Homo sapien
accttaggcgactatatggg

SEQ ID NO: 6099482 - DNA, 20 bp, Homo sapien
cccatagtgctcagtggagt

SEQ ID NO: 6099483 - DNA, 20 bp, Homo sapien
actccactgagcactatggg

SEQ ID NO: 6099484 - DNA, 20 bp, Homo sapien
ctggtgcatgtactcgactg

SEQ ID NO: 6099485 - DNA, 20 bp, Homo sapien
cagtcgagtacatgcaccag

SEQ ID NO: 6099486 - DNA, 20 bp, Homo sapien
cttctgatgatctatgcgcg

SEQ ID NO: 6099487 - DNA, 20 bp, Homo sapien
cgcgcatagatcatcagaag

SEQ ID NO: 6099488 - DNA, 20 bp, Homo sapien
cccagcgatggatgagacta

SEQ ID NO: 6099489 - DNA, 20 bp, Homo sapien
tagtctcatccatcgctggg

SEQ ID NO: 6099490 - DNA, 20 bp, Homo sapien
ccatagtctcgatcctgata

SEQ ID NO: 6099491 - DNA, 20 bp, Homo sapien
tatcaggatcgagactatgg

SEQ ID NO: 6099492 - DNA, 20 bp, Homo sapien
ccatagtatcctgtaagcgt

SEQ ID NO: 6099493 - DNA, 20 bp, Homo sapien
acgcttacaggatactatgg

SEQ ID NO: 6099494 - DNA, 20 bp, Homo sapien
ccagtggtgagtcgctacat

SEQ ID NO: 6099495 - DNA, 20 bp, Homo sapien
atgtagcgactcaccactgg

SEQ ID NO: 6099496 - DNA, 20 bp, Homo sapien
ccaggtattaacgccgtctg

SEQ ID NO: 6099497 - DNA, 20 bp, Homo sapien
cagacggcgttaatacctgg

SEQ ID NO: 6099498 - DNA, 20 bp, Homo sapien
ccaggccgtacctagtgatt

SEQ ID NO: 6099499 - DNA, 20 bp, Homo sapien
aatcactaggtacggcctgg

SEQ ID NO: 6099500 - DNA, 20 bp, Homo sapien
ccagctagtcgtgacgtatg

SEQ ID NO: 6099501 - DNA, 20 bp, Homo sapien
catacgtcacgactagctgg

SEQ ID NO: 6099502 - DNA, 20 bp, Homo sapien
ccaccgggctagtgtaagtt

SEQ ID NO: 6099503 - DNA, 20 bp, Homo sapien
aacttacactagcccggtgg

SEQ ID NO: 6099504 - DNA, 20 bp, Homo sapien
ccaatgtacctatatcgtgg

SEQ ID NO: 6099505 - DNA, 20 bp, Homo sapien
ccacgatataggtacattgg

SEQ ID NO: 6099506 - DNA, 20 bp, Homo sapien
ccaagcgcgtaaggtcgtat

SEQ ID NO: 6099507 - DNA, 20 bp, Homo sapien
atacgaccttacgcgcttgg

SEQ ID NO: 6099508 - DNA, 20 bp, Homo sapien
cgcttaaatcatctgcgtgt

SEQ ID NO: 6099509 - DNA, 20 bp, Homo sapien
acacgcagatgatttaagcg

SEQ ID NO: 6099510 - DNA, 20 bp, Homo sapien
cattacgggacctggcgtta

SEQ ID NO: 6099511 - DNA, 20 bp, Homo sapien
taacgccaggtcccgtaatg

SEQ ID NO: 6099512 - DNA, 20 bp, Homo sapien
catgtgcctgacggtcgtat

SEQ ID NO: 6099513 - DNA, 20 bp, Homo sapien
atacgaccgtcaggcacatg

SEQ ID NO: 6099514 - DNA, 20 bp, Homo sapien
catgcgtctcctcagtaggt

SEQ ID NO: 6099515 - DNA, 20 bp, Homo sapien
acctactgaggagacgcatg

SEQ ID NO: 6099516 - DNA, 20 bp, Homo sapien
catatcagtctcgaccgtgg

SEQ ID NO: 6099517 - DNA, 20 bp, Homo sapien
ccacggtcgagactgatatg

SEQ ID NO: 6099518 - DNA, 20 bp, Homo sapien
cagtgtctaatcatccgtgc

SEQ ID NO: 6099519 - DNA, 20 bp, Homo sapien
gcacggatgattagacactg

SEQ ID NO: 6099520 - DNA, 20 bp, Homo sapien
cagggatctgagcgtcacta

SEQ ID NO: 6099521 - DNA, 20 bp, Homo sapien
tagtgacgctcagatccctg

SEQ ID NO: 6099522 - DNA, 20 bp, Homo sapien
cagcacgtcctacggtataa

SEQ ID NO: 6099523 - DNA, 20 bp, Homo sapien
ttataccgtaggacgtgctg

SEQ ID NO: 6099524 - DNA, 20 bp, Homo sapien
cagatcgctagtacgagtta

SEQ ID NO: 6099525 - DNA, 20 bp, Homo sapien
taactcgtactagcgatctg

SEQ ID NO: 6099526 - DNA, 20 bp, Homo sapien
cagaattacaacccgtttgc

SEQ ID NO: 6099527 - DNA, 20 bp, Homo sapien
gcaaacgggttgtaattctg

SEQ ID NO: 6099528 - DNA, 20 bp, Homo sapien
cagaatgcgatagcgtcgaa

SEQ ID NO: 6099529 - DNA, 20 bp, Homo sapien
ttcgacgctatcgcattctg

SEQ ID NO: 6099530 - DNA, 20 bp, Homo sapien
atctccactgcatcaggtga

SEQ ID NO: 6099531 - DNA, 20 bp, Homo sapien
tcacctgatgcagtggagat

SEQ ID NO: 6099532 - DNA, 20 bp, Homo sapien
cactgccgtgatcgttatat

SEQ ID NO: 6099533 - DNA, 20 bp, Homo sapien
atataacgatcacggcagtg

SEQ ID NO: 6099534 - DNA, 20 bp, Homo sapien
cactcgtctaagtcggtctg

SEQ ID NO: 6099535 - DNA, 20 bp, Homo sapien
cagaccgacttagacgagtg

SEQ ID NO: 6099536 - DNA, 20 bp, Homo sapien
cactataatgtaaaccgcgc

SEQ ID NO: 6099537 - DNA, 20 bp, Homo sapien
gcgcggtttacattatagtg

SEQ ID NO: 6099538 - DNA, 20 bp, Homo sapien
cactagagtctcgcgtcgaa

SEQ ID NO: 6099539 - DNA, 20 bp, Homo sapien
ttcgacgcgagactctagtg

SEQ ID NO: 6099540 - DNA, 20 bp, Homo sapien
cacgagcgtctcctaaatag

SEQ ID NO: 6099541 - DNA, 20 bp, Homo sapien
ctatttaggagacgctcgtg

SEQ ID NO: 6099542 - DNA, 20 bp, Homo sapien
cacgactgtaagcgcggtaa

SEQ ID NO: 6099543 - DNA, 20 bp, Homo sapien
ttaccgcgcttacagtcgtg

SEQ ID NO: 6099544 - DNA, 20 bp, Homo sapien
cacgacgtactcggtcaagt

SEQ ID NO: 6099545 - DNA, 20 bp, Homo sapien
acttgaccgagtacgtcgtg

SEQ ID NO: 6099546 - DNA, 20 bp, Homo sapien
cacacggtgatccggctaaa

SEQ ID NO: 6099547 - DNA, 20 bp, Homo sapien
tttagccggatcaccgtgtg

SEQ ID NO: 6099548 - DNA, 20 bp, Homo sapien
caattagcgagtcgtcgtaa

SEQ ID NO: 6099549 - DNA, 20 bp, Homo sapien
ttacgacgactcgctaattg

SEQ ID NO: 6099550 - DNA, 20 bp, Homo sapien
caatgatcgacctggagtct

SEQ ID NO: 6099551 - DNA, 20 bp, Homo sapien
agactccaggtcgatcattg

SEQ ID NO: 6099552 - DNA, 20 bp, Homo sapien
tgctacattgtgtcgctggc

SEQ ID NO: 6099553 - DNA, 20 bp, Homo sapien
gccagcgacacaatgtagca

SEQ ID NO: 6099554 - DNA, 20 bp, Homo sapien
caatgataggctagtctcgc

SEQ ID NO: 6099555 - DNA, 20 bp, Homo sapien
gcgagactagcctatcattg

SEQ ID NO: 6099556 - DNA, 20 bp, Homo sapien
caatacagtagcgtctaagg

SEQ ID NO: 6099557 - DNA, 20 bp, Homo sapien
ccttagacgctactgtattg

SEQ ID NO: 6099558 - DNA, 20 bp, Homo sapien
caactgtgtaacaatcgtcg

SEQ ID NO: 6099559 - DNA, 20 bp, Homo sapien
cgacgattgttacacagttg

SEQ ID NO: 6099560 - DNA, 20 bp, Homo sapien
caactaagtgctaccgtcta

SEQ ID NO: 6099561 - DNA, 20 bp, Homo sapien
tagacggtagcacttagttg

SEQ ID NO: 6099562 - DNA, 20 bp, Homo sapien
caacgggtggactctgcaat

SEQ ID NO: 6099563 - DNA, 20 bp, Homo sapien
attgcagagtccacccgttg

SEQ ID NO: 6099564 - DNA, 20 bp, Homo sapien
caacggcatgatccctatga

SEQ ID NO: 6099565 - DNA, 20 bp, Homo sapien
tcatagggatcatgccgttg

SEQ ID NO: 6099566 - DNA, 20 bp, Homo sapien
caacgcggtaactcggtcta

SEQ ID NO: 6099567 - DNA, 20 bp, Homo sapien
tagaccgagttaccgcgttg

SEQ ID NO: 6099568 - DNA, 20 bp, Homo sapien
caacccgtgcctagagatat

SEQ ID NO: 6099569 - DNA, 20 bp, Homo sapien
atatctctaggcacgggttg

SEQ ID NO: 6099570 - DNA, 20 bp, Homo sapien
caaatggcgagaggtcccta

SEQ ID NO: 6099571 - DNA, 20 bp, Homo sapien
tagggacctctcgccatttg

SEQ ID NO: 6099572 - DNA, 20 bp, Homo sapien
caaatatagctccgtccggt

SEQ ID NO: 6099573 - DNA, 20 bp, Homo sapien
accggacggagctatatttg

SEQ ID NO: 6099574 - DNA, 20 bp, Homo sapien
tagttgacttggagtatgcc

SEQ ID NO: 6099575 - DNA, 20 bp, Homo sapien
ggcatactccaagtcaacta

SEQ ID NO: 6099576 - DNA, 20 bp, Homo sapien
caaacgtcgagtgctaacgg

SEQ ID NO: 6099577 - DNA, 20 bp, Homo sapien
ccgttagcactcgacgtttg

SEQ ID NO: 6099578 - DNA, 20 bp, Homo sapien
atttatcactaatgcccgcg

SEQ ID NO: 6099579 - DNA, 20 bp, Homo sapien
cgcgggcattagtgataaat

SEQ ID NO: 6099580 - DNA, 20 bp, Homo sapien
attgctgcgaaagggttcct

SEQ ID NO: 6099581 - DNA, 20 bp, Homo sapien
aggaaccctttcgcagcaat

SEQ ID NO: 6099582 - DNA, 20 bp, Homo sapien
attgaccaaactgcggtgcg

SEQ ID NO: 6099583 - DNA, 20 bp, Homo sapien
cgcaccgcagtttggtcaat

SEQ ID NO: 6099584 - DNA, 20 bp, Homo sapien
attcgtggaacgtcctatct

SEQ ID NO: 6099585 - DNA, 20 bp, Homo sapien
agataggacgttccacgaat

SEQ ID NO: 6099586 - DNA, 20 bp, Homo sapien
attcggcccagtgcgataaa

SEQ ID NO: 6099587 - DNA, 20 bp, Homo sapien
tttatcgcactgggccgaat

SEQ ID NO: 6099588 - DNA, 20 bp, Homo sapien
attcgataacctgtaacccg

SEQ ID NO: 6099589 - DNA, 20 bp, Homo sapien
cgggttacaggttatcgaat

SEQ ID NO: 6099590 - DNA, 20 bp, Homo sapien
attcaccacgctctagggat

SEQ ID NO: 6099591 - DNA, 20 bp, Homo sapien
atccctagagcgtggtgaat

SEQ ID NO: 6099592 - DNA, 20 bp, Homo sapien
attagtcgcaatgcaggcgt

SEQ ID NO: 6099593 - DNA, 20 bp, Homo sapien
acgcctgcattgcgactaat

SEQ ID NO: 6099594 - DNA, 20 bp, Homo sapien
attaggacaatgcgcctccg

SEQ ID NO: 6099595 - DNA, 20 bp, Homo sapien
cggaggcgcattgtcctaat

SEQ ID NO: 6099596 - DNA, 20 bp, Homo sapien
ctggtcgctgctgtcatcta

SEQ ID NO: 6099597 - DNA, 20 bp, Homo sapien
tagatgacagcagcgaccag

SEQ ID NO: 6099598 - DNA, 20 bp, Homo sapien
attaaggtaactgccgtcgc

SEQ ID NO: 6099599 - DNA, 20 bp, Homo sapien
gcgacggcagttaccttaat

SEQ ID NO: 6099600 - DNA, 20 bp, Homo sapien
attaagatgatatgcgcccg

SEQ ID NO: 6099601 - DNA, 20 bp, Homo sapien
cgggcgcatatcatcttaat

SEQ ID NO: 6099602 - DNA, 20 bp, Homo sapien
attaactcgactgccgcgtg

SEQ ID NO: 6099603 - DNA, 20 bp, Homo sapien
cacgcggcagtcgagttaat

SEQ ID NO: 6099604 - DNA, 20 bp, Homo sapien
attaacggacgtgttgacct

SEQ ID NO: 6099605 - DNA, 20 bp, Homo sapien
aggtcaacacgtccgttaat

SEQ ID NO: 6099606 - DNA, 20 bp, Homo sapien
attaaagcgatgcgtccctc

SEQ ID NO: 6099607 - DNA, 20 bp, Homo sapien
gagggacgcatcgctttaat

SEQ ID NO: 6099608 - DNA, 20 bp, Homo sapien
atgtgaccctggatacccgt

SEQ ID NO: 6099609 - DNA, 20 bp, Homo sapien
acgggtatccagggtcacat

SEQ ID NO: 6099610 - DNA, 20 bp, Homo sapien
atgtacccgactcttgcgtt

SEQ ID NO: 6099611 - DNA, 20 bp, Homo sapien
aacgcaagagtcgggtacat

SEQ ID NO: 6099612 - DNA, 20 bp, Homo sapien
atgggcgtagctgcctcaaa

SEQ ID NO: 6099613 - DNA, 20 bp, Homo sapien
tttgaggcagctacgcccat

SEQ ID NO: 6099614 - DNA, 20 bp, Homo sapien
atggcggatcgtcgtaacca

SEQ ID NO: 6099615 - DNA, 20 bp, Homo sapien
tggttacgacgatccgccat

SEQ ID NO: 6099616 - DNA, 20 bp, Homo sapien
atggcgctccgtcctaagaa

SEQ ID NO: 6099617 - DNA, 20 bp, Homo sapien
ttcttaggacggagcgccat

SEQ ID NO: 6099618 - DNA, 20 bp, Homo sapien
ctggtcaatgctcgtcgctt

SEQ ID NO: 6099619 - DNA, 20 bp, Homo sapien
aagcgacgagcattgaccag

SEQ ID NO: 6099620 - DNA, 20 bp, Homo sapien
atggaccgtactgcgctata

SEQ ID NO: 6099621 - DNA, 20 bp, Homo sapien
tatagcgcagtacggtccat

SEQ ID NO: 6099622 - DNA, 20 bp, Homo sapien
atggaccctcgtatcgactg

SEQ ID NO: 6099623 - DNA, 20 bp, Homo sapien
cagtcgatacgagggtccat

SEQ ID NO: 6099624 - DNA, 20 bp, Homo sapien
atgcgaggctctccgctaaa

SEQ ID NO: 6099625 - DNA, 20 bp, Homo sapien
tttagcggagagcctcgcat

SEQ ID NO: 6099626 - DNA, 20 bp, Homo sapien
atgccgtagctgcgataacg

SEQ ID NO: 6099627 - DNA, 20 bp, Homo sapien
cgttatcgcagctacggcat

SEQ ID NO: 6099628 - DNA, 20 bp, Homo sapien
atgcccgtcggtccatgaaa

SEQ ID NO: 6099629 - DNA, 20 bp, Homo sapien
tttcatggaccgacgggcat

SEQ ID NO: 6099630 - DNA, 20 bp, Homo sapien
atgacgcatgagcctcgtat

SEQ ID NO: 6099631 - DNA, 20 bp, Homo sapien
atacgaggctcatgcgtcat

SEQ ID NO: 6099632 - DNA, 20 bp, Homo sapien
atctgcgagcgtgccatcat

SEQ ID NO: 6099633 - DNA, 20 bp, Homo sapien
atgatggcacgctcgcagat

SEQ ID NO: 6099634 - DNA, 20 bp, Homo sapien
atcgtaactagggtacagtg

SEQ ID NO: 6099635 - DNA, 20 bp, Homo sapien
cactgtaccctagttacgat

SEQ ID NO: 6099636 - DNA, 20 bp, Homo sapien
atcgggcgtcgtatcccata

SEQ ID NO: 6099637 - DNA, 20 bp, Homo sapien
tatgggatacgacgcccgat

SEQ ID NO: 6099638 - DNA, 20 bp, Homo sapien
atcctcggtacgcgggaatt

SEQ ID NO: 6099639 - DNA, 20 bp, Homo sapien
aattcccgcgtaccgaggat

SEQ ID NO: 6099640 - DNA, 20 bp, Homo sapien
cacgacgctctcataataga

SEQ ID NO: 6099641 - DNA, 20 bp, Homo sapien
tctattatgagagcgtcgtg

SEQ ID NO: 6099642 - DNA, 20 bp, Homo sapien
atccgtactactctcgatag

SEQ ID NO: 6099643 - DNA, 20 bp, Homo sapien
ctatcgagagtagtacggat

SEQ ID NO: 6099644 - DNA, 20 bp, Homo sapien
atccgaagtagtcgatagtc

SEQ ID NO: 6099645 - DNA, 20 bp, Homo sapien
gactatcgactacttcggat

SEQ ID NO: 6099646 - DNA, 20 bp, Homo sapien
atccatagtcctaagtccgg

SEQ ID NO: 6099647 - DNA, 20 bp, Homo sapien
ccggacttaggactatggat

SEQ ID NO: 6099648 - DNA, 20 bp, Homo sapien
atccacgatcctagagtcgg

SEQ ID NO: 6099649 - DNA, 20 bp, Homo sapien
ccgactctaggatcgtggat

SEQ ID NO: 6099650 - DNA, 20 bp, Homo sapien
atcatgctcacccgtagttt

SEQ ID NO: 6099651 - DNA, 20 bp, Homo sapien
aaactacgggtgagcatgat

SEQ ID NO: 6099652 - DNA, 20 bp, Homo sapien
atcactatgactgagtaccg

SEQ ID NO: 6099653 - DNA, 20 bp, Homo sapien
cggtactcagtcatagtgat

SEQ ID NO: 6099654 - DNA, 20 bp, Homo sapien
atcaatactcgtccgcaggt

SEQ ID NO: 6099655 - DNA, 20 bp, Homo sapien
acctgcggacgagtattgat

SEQ ID NO: 6099656 - DNA, 20 bp, Homo sapien
atattcggaacgtcgcctgg

SEQ ID NO: 6099657 - DNA, 20 bp, Homo sapien
ccaggcgacgttccgaatat

SEQ ID NO: 6099658 - DNA, 20 bp, Homo sapien
atatgcgggaagtctagccc

SEQ ID NO: 6099659 - DNA, 20 bp, Homo sapien
gggctagacttcccgcatat

SEQ ID NO: 6099660 - DNA, 20 bp, Homo sapien
atatgccgtcacctagtcta

SEQ ID NO: 6099661 - DNA, 20 bp, Homo sapien
tagactaggtgacggcatat

SEQ ID NO: 6099662 - DNA, 20 bp, Homo sapien
atctcagtcagtatcgagct

SEQ ID NO: 6099663 - DNA, 20 bp, Homo sapien
agctcgatactgactgagat

SEQ ID NO: 6099664 - DNA, 20 bp, Homo sapien
atatcgtgtcacaggtcgtt

SEQ ID NO: 6099665 - DNA, 20 bp, Homo sapien
aacgacctgtgacacgatat

SEQ ID NO: 6099666 - DNA, 20 bp, Homo sapien
atatagcgtaggtgagaccc

SEQ ID NO: 6099667 - DNA, 20 bp, Homo sapien
gggtctcacctacgctatat

SEQ ID NO: 6099668 - DNA, 20 bp, Homo sapien
atatactgtagagaacgggc

SEQ ID NO: 6099669 - DNA, 20 bp, Homo sapien
gcccgttctctacagtatat

SEQ ID NO: 6099670 - DNA, 20 bp, Homo sapien
atagtccgtaggctcgtatc

SEQ ID NO: 6099671 - DNA, 20 bp, Homo sapien
gatacgagcctacggactat

SEQ ID NO: 6099672 - DNA, 20 bp, Homo sapien
ataggtcgtaatgacgctct

SEQ ID NO: 6099673 - DNA, 20 bp, Homo sapien
agagcgtcattacgacctat

SEQ ID NO: 6099674 - DNA, 20 bp, Homo sapien
atagcggtgcaggccactaa

SEQ ID NO: 6099675 - DNA, 20 bp, Homo sapien
ttagtggcctgcaccgctat

SEQ ID NO: 6099676 - DNA, 20 bp, Homo sapien
atactttcctcatacggtcg

SEQ ID NO: 6099677 - DNA, 20 bp, Homo sapien
cgaccgtatgaggaaagtat

SEQ ID NO: 6099678 - DNA, 20 bp, Homo sapien
atactggctacacgtccata

SEQ ID NO: 6099679 - DNA, 20 bp, Homo sapien
tatggacgtgtagccagtat

SEQ ID NO: 6099680 - DNA, 20 bp, Homo sapien
atacgcgggtcctccgaaat

SEQ ID NO: 6099681 - DNA, 20 bp, Homo sapien
atttcggaggacccgcgtat

SEQ ID NO: 6099682 - DNA, 20 bp, Homo sapien
atacgaggtgcagatcactc

SEQ ID NO: 6099683 - DNA, 20 bp, Homo sapien
gagtgatctgcacctcgtat

SEQ ID NO: 6099684 - DNA, 20 bp, Homo sapien
agcagaactctatacacctg

SEQ ID NO: 6099685 - DNA, 20 bp, Homo sapien
caggtgtatagagttctgct

SEQ ID NO: 6099686 - DNA, 20 bp, Homo sapien
atacagtcgtccgggtcgaa

SEQ ID NO: 6099687 - DNA, 20 bp, Homo sapien
ttcgacccggacgactgtat

SEQ ID NO: 6099688 - DNA, 20 bp, Homo sapien
ataatatggaactaggcgcg

SEQ ID NO: 6099689 - DNA, 20 bp, Homo sapien
cgcgcctagttccatattat

SEQ ID NO: 6099690 - DNA, 20 bp, Homo sapien
ataagctcgatccctgcgta

SEQ ID NO: 6099691 - DNA, 20 bp, Homo sapien
tacgcagggatcgagcttat

SEQ ID NO: 6099692 - DNA, 20 bp, Homo sapien
ataactgatgacgcggagtc

SEQ ID NO: 6099693 - DNA, 20 bp, Homo sapien
gactccgcgtcatcagttat

SEQ ID NO: 6099694 - DNA, 20 bp, Homo sapien
ataactactgactacggagg

SEQ ID NO: 6099695 - DNA, 20 bp, Homo sapien
cctccgtagtcagtagttat

SEQ ID NO: 6099696 - DNA, 20 bp, Homo sapien
ataacccgtgctcgcggata

SEQ ID NO: 6099697 - DNA, 20 bp, Homo sapien
tatccgcgagcacgggttat

SEQ ID NO: 6099698 - DNA, 20 bp, Homo sapien
ataaactgcatccggtctac

SEQ ID NO: 6099699 - DNA, 20 bp, Homo sapien
gtagaccggatgcagtttat

SEQ ID NO: 6099700 - DNA, 20 bp, Homo sapien
agttcgggctcggctcaaat

SEQ ID NO: 6099701 - DNA, 20 bp, Homo sapien
atttgagccgagcccgaact

SEQ ID NO: 6099702 - DNA, 20 bp, Homo sapien
agtgcattaaacaatcggcg

SEQ ID NO: 6099703 - DNA, 20 bp, Homo sapien
cgccgattgtttaatgcact

SEQ ID NO: 6099704 - DNA, 20 bp, Homo sapien
agtcttcaccgacctagtat

SEQ ID NO: 6099705 - DNA, 20 bp, Homo sapien
atactaggtcggtgaagact

SEQ ID NO: 6099706 - DNA, 20 bp, Homo sapien
agcactctggcagcagtcat

SEQ ID NO: 6099707 - DNA, 20 bp, Homo sapien
atgactgctgccagagtgct

SEQ ID NO: 6099708 - DNA, 20 bp, Homo sapien
cgtcgctctggtacactatg

SEQ ID NO: 6099709 - DNA, 20 bp, Homo sapien
catagtgtaccagagcgacg

SEQ ID NO: 6099710 - DNA, 20 bp, Homo sapien
cagttctacgatggcaagtc

SEQ ID NO: 6099711 - DNA, 20 bp, Homo sapien
gacttgccatcgtagaactg

SEQ ID NO: 6099712 - DNA, 20 bp, Homo sapien
agtctgatcccatcgcgtat

SEQ ID NO: 6099713 - DNA, 20 bp, Homo sapien
atacgcgatgggatcagact

SEQ ID NO: 6099714 - DNA, 20 bp, Homo sapien
agtcgggctaggtcccataa

SEQ ID NO: 6099715 - DNA, 20 bp, Homo sapien
ttatgggacctagcccgact

SEQ ID NO: 6099716 - DNA, 20 bp, Homo sapien
agtcgcggtcgtaagtacca

SEQ ID NO: 6099717 - DNA, 20 bp, Homo sapien
tggtacttacgaccgcgact

SEQ ID NO: 6099718 - DNA, 20 bp, Homo sapien
agtcctctccgtagcgtagt

SEQ ID NO: 6099719 - DNA, 20 bp, Homo sapien
actacgctacggagaggact

SEQ ID NO: 6099720 - DNA, 20 bp, Homo sapien
agtccggtcctgacgaatag

SEQ ID NO: 6099721 - DNA, 20 bp, Homo sapien
ctattcgtcaggaccggact

SEQ ID NO: 6099722 - DNA, 20 bp, Homo sapien
agtagtccgtacctcggtca

SEQ ID NO: 6099723 - DNA, 20 bp, Homo sapien
tgaccgaggtacggactact

SEQ ID NO: 6099724 - DNA, 20 bp, Homo sapien
agtagccgtgactatcgagt

SEQ ID NO: 6099725 - DNA, 20 bp, Homo sapien
actcgatagtcacggctact

SEQ ID NO: 6099726 - DNA, 20 bp, Homo sapien
agtacgtgcagcggtatcca

SEQ ID NO: 6099727 - DNA, 20 bp, Homo sapien
tggataccgctgcacgtact

SEQ ID NO: 6099728 - DNA, 20 bp, Homo sapien
aggtcgtctagccgctcaaa

SEQ ID NO: 6099729 - DNA, 20 bp, Homo sapien
tttgagcggctagacgacct

SEQ ID NO: 6099730 - DNA, 20 bp, Homo sapien
agggtatctatcgagcgacc

SEQ ID NO: 6099731 - DNA, 20 bp, Homo sapien
ggtcgctcgatagataccct

SEQ ID NO: 6099732 - DNA, 20 bp, Homo sapien
aacaccgatccatagcgatg

SEQ ID NO: 6099733 - DNA, 20 bp, Homo sapien
catcgctatggatcggtgtt

SEQ ID NO: 6099734 - DNA, 20 bp, Homo sapien
aggatgtaaacggtgccctc

SEQ ID NO: 6099735 - DNA, 20 bp, Homo sapien
gagggcaccgtttacatcct

SEQ ID NO: 6099736 - DNA, 20 bp, Homo sapien
aggaagtgacatccgatccg

SEQ ID NO: 6099737 - DNA, 20 bp, Homo sapien
cggatcggatgtcacttcct

SEQ ID NO: 6099738 - DNA, 20 bp, Homo sapien
agcgtaatcggtacacctcg

SEQ ID NO: 6099739 - DNA, 20 bp, Homo sapien
cgaggtgtaccgattacgct

SEQ ID NO: 6099740 - DNA, 20 bp, Homo sapien
agcgactgtaaactaatcgg

SEQ ID NO: 6099741 - DNA, 20 bp, Homo sapien
ccgattagtttacagtcgct

SEQ ID NO: 6099742 - DNA, 20 bp, Homo sapien
agccgcaatgcacgactgat

SEQ ID NO: 6099743 - DNA, 20 bp, Homo sapien
atcagtcgtgcattgcggct

SEQ ID NO: 6099744 - DNA, 20 bp, Homo sapien
agccgatatacggtctagga

SEQ ID NO: 6099745 - DNA, 20 bp, Homo sapien
tcctagaccgtatatcggct

SEQ ID NO: 6099746 - DNA, 20 bp, Homo sapien
agcagagctagatccggtac

SEQ ID NO: 6099747 - DNA, 20 bp, Homo sapien
gtaccggatctagctctgct

SEQ ID NO: 6099748 - DNA, 20 bp, Homo sapien
agcacagctcataggcgttt

SEQ ID NO: 6099749 - DNA, 20 bp, Homo sapien
aaacgcctatgagctgtgct

SEQ ID NO: 6099750 - DNA, 20 bp, Homo sapien
agattacggactgtgctttg

SEQ ID NO: 6099751 - DNA, 20 bp, Homo sapien
caaagcacagtccgtaatct

SEQ ID NO: 6099752 - DNA, 20 bp, Homo sapien
agatcgtaaatcgtaccacg

SEQ ID NO: 6099753 - DNA, 20 bp, Homo sapien
cgtggtacgatttacgatct

SEQ ID NO: 6099754 - DNA, 20 bp, Homo sapien
tgcgttggttgtcgctcaca

SEQ ID NO: 6099755 - DNA, 20 bp, Homo sapien
tgtgagcgacaaccaacgca

SEQ ID NO: 6099756 - DNA, 20 bp, Homo sapien
agataatataacggtccggg

SEQ ID NO: 6099757 - DNA, 20 bp, Homo sapien
cccggaccgttatattatct

SEQ ID NO: 6099758 - DNA, 20 bp, Homo sapien
agagtcggtaggcactatcc

SEQ ID NO: 6099759 - DNA, 20 bp, Homo sapien
ggatagtgcctaccgactct

SEQ ID NO: 6099760 - DNA, 20 bp, Homo sapien
agactcaatctacctaagcg

SEQ ID NO: 6099761 - DNA, 20 bp, Homo sapien
cgcttaggtagattgagtct

SEQ ID NO: 6099762 - DNA, 20 bp, Homo sapien
agaccctgtaagaccgtcga

SEQ ID NO: 6099763 - DNA, 20 bp, Homo sapien
tcgacggtcttacagggtct

SEQ ID NO: 6099764 - DNA, 20 bp, Homo sapien
agacagctccatccggtata

SEQ ID NO: 6099765 - DNA, 20 bp, Homo sapien
tataccggatggagctgtct

SEQ ID NO: 6099766 - DNA, 20 bp, Homo sapien
agacacatgacgagcggtta

SEQ ID NO: 6099767 - DNA, 20 bp, Homo sapien
taaccgctcgtcatgtgtct

SEQ ID NO: 6099768 - DNA, 20 bp, Homo sapien
agaatgtcgaaacgtccctc

SEQ ID NO: 6099769 - DNA, 20 bp, Homo sapien
gagggacgtttcgacattct

SEQ ID NO: 6099770 - DNA, 20 bp, Homo sapien
agaatcgtacacgctgctgc

SEQ ID NO: 6099771 - DNA, 20 bp, Homo sapien
gcagcagcgtgtacgattct

SEQ ID NO: 6099772 - DNA, 20 bp, Homo sapien
agaagtagtcactccgcgct

SEQ ID NO: 6099773 - DNA, 20 bp, Homo sapien
agcgcggagtgactacttct

SEQ ID NO: 6099774 - DNA, 20 bp, Homo sapien
acttcgcggagctgatccaa

SEQ ID NO: 6099775 - DNA, 20 bp, Homo sapien
ttggatcagctccgcgaagt

SEQ ID NO: 6099776 - DNA, 20 bp, Homo sapien
tcgcagactttacgatagtg

SEQ ID NO: 6099777 - DNA, 20 bp, Homo sapien
cactatcgtaaagtctgcga

SEQ ID NO: 6099778 - DNA, 20 bp, Homo sapien
acttacggcactgagcattt

SEQ ID NO: 6099779 - DNA, 20 bp, Homo sapien
aaatgctcagtgccgtaagt

SEQ ID NO: 6099780 - DNA, 20 bp, Homo sapien
actgtcgtcaacgtcaggca

SEQ ID NO: 6099781 - DNA, 20 bp, Homo sapien
tgcctgacgttgacgacagt

SEQ ID NO: 6099782 - DNA, 20 bp, Homo sapien
actgtagcgacacggttcgt

SEQ ID NO: 6099783 - DNA, 20 bp, Homo sapien
acgaaccgtgtcgctacagt

SEQ ID NO: 6099784 - DNA, 20 bp, Homo sapien
actgctcaatcctagatacg

SEQ ID NO: 6099785 - DNA, 20 bp, Homo sapien
cgtatctaggattgagcagt

SEQ ID NO: 6099786 - DNA, 20 bp, Homo sapien
actgccggaacgtataggct

SEQ ID NO: 6099787 - DNA, 20 bp, Homo sapien
agcctatacgttccggcagt

SEQ ID NO: 6099788 - DNA, 20 bp, Homo sapien
actgacatccctcggagttg

SEQ ID NO: 6099789 - DNA, 20 bp, Homo sapien
caactccgagggatgtcagt

SEQ ID NO: 6099790 - DNA, 20 bp, Homo sapien
actctcgacctagcgtaagg

SEQ ID NO: 6099791 - DNA, 20 bp, Homo sapien
ccttacgctaggtcgagagt

SEQ ID NO: 6099792 - DNA, 20 bp, Homo sapien
actcgtcggatgcaatgatc

SEQ ID NO: 6099793 - DNA, 20 bp, Homo sapien
gatcattgcatccgacgagt

SEQ ID NO: 6099794 - DNA, 20 bp, Homo sapien
actcgtatatcataagcccg

SEQ ID NO: 6099795 - DNA, 20 bp, Homo sapien
cgggcttatgatatacgagt

SEQ ID NO: 6099796 - DNA, 20 bp, Homo sapien
actcatctataaagcctcgg

SEQ ID NO: 6099797 - DNA, 20 bp, Homo sapien
ccgaggctttatagatgagt

SEQ ID NO: 6099798 - DNA, 20 bp, Homo sapien
tcgcaagatttacgcagtgt

SEQ ID NO: 6099799 - DNA, 20 bp, Homo sapien
acactgcgtaaatcttgcga

SEQ ID NO: 6099800 - DNA, 20 bp, Homo sapien
actcatccgtcaggctagat

SEQ ID NO: 6099801 - DNA, 20 bp, Homo sapien
atctagcctgacggatgagt

SEQ ID NO: 6099802 - DNA, 20 bp, Homo sapien
actatccgtcactcaagtag

SEQ ID NO: 6099803 - DNA, 20 bp, Homo sapien
ctacttgagtgacggatagt

SEQ ID NO: 6099804 - DNA, 20 bp, Homo sapien
actactggacaatcgtcatg

SEQ ID NO: 6099805 - DNA, 20 bp, Homo sapien
catgacgattgtccagtagt

SEQ ID NO: 6099806 - DNA, 20 bp, Homo sapien
actaacggtgacgagtatgc

SEQ ID NO: 6099807 - DNA, 20 bp, Homo sapien
gcatactcgtcaccgttagt

SEQ ID NO: 6099808 - DNA, 20 bp, Homo sapien
acgttcgtcaagagtcgcat

SEQ ID NO: 6099809 - DNA, 20 bp, Homo sapien
atgcgactcttgacgaacgt

SEQ ID NO: 6099810 - DNA, 20 bp, Homo sapien
acgtcgcgtagcgtgaatca

SEQ ID NO: 6099811 - DNA, 20 bp, Homo sapien
tgattcacgctacgcgacgt

SEQ ID NO: 6099812 - DNA, 20 bp, Homo sapien
acgtccgagcgtctacgata

SEQ ID NO: 6099813 - DNA, 20 bp, Homo sapien
tatcgtagacgctcggacgt

SEQ ID NO: 6099814 - DNA, 20 bp, Homo sapien
acgggtgccactcgatcaaa

SEQ ID NO: 6099815 - DNA, 20 bp, Homo sapien
tttgatcgagtggcacccgt

SEQ ID NO: 6099816 - DNA, 20 bp, Homo sapien
acgggtctcgcatactcgtt

SEQ ID NO: 6099817 - DNA, 20 bp, Homo sapien
aacgagtatgcgagacccgt

SEQ ID NO: 6099818 - DNA, 20 bp, Homo sapien
acggacgctctcggacataa

SEQ ID NO: 6099819 - DNA, 20 bp, Homo sapien
ttatgtccgagagcgtccgt

SEQ ID NO: 6099820 - DNA, 20 bp, Homo sapien
gcttcgcggtcatggtctat

SEQ ID NO: 6099821 - DNA, 20 bp, Homo sapien
atagaccatgaccgcgaagc

SEQ ID NO: 6099822 - DNA, 20 bp, Homo sapien
acgctcgctacgacgtgaat

SEQ ID NO: 6099823 - DNA, 20 bp, Homo sapien
attcacgtcgtagcgagcgt

SEQ ID NO: 6099824 - DNA, 20 bp, Homo sapien
acgcatggaggacgtaccaa

SEQ ID NO: 6099825 - DNA, 20 bp, Homo sapien
ttggtacgtcctccatgcgt

SEQ ID NO: 6099826 - DNA, 20 bp, Homo sapien
acgcagtctacgcatatacg

SEQ ID NO: 6099827 - DNA, 20 bp, Homo sapien
cgtatatgcgtagactgcgt

SEQ ID NO: 6099828 - DNA, 20 bp, Homo sapien
acgcacgtccacggtgattt

SEQ ID NO: 6099829 - DNA, 20 bp, Homo sapien
aaatcaccgtggacgtgcgt

SEQ ID NO: 6099830 - DNA, 20 bp, Homo sapien
acgatcagtcctacgacggt

SEQ ID NO: 6099831 - DNA, 20 bp, Homo sapien
accgtcgtaggactgatcgt

SEQ ID NO: 6099832 - DNA, 20 bp, Homo sapien
acgaagctcccagggtgaat

SEQ ID NO: 6099833 - DNA, 20 bp, Homo sapien
attcaccctgggagcttcgt

SEQ ID NO: 6099834 - DNA, 20 bp, Homo sapien
acgaaccgtcctacagaatt

SEQ ID NO: 6099835 - DNA, 20 bp, Homo sapien
aattctgtaggacggttcgt

SEQ ID NO: 6099836 - DNA, 20 bp, Homo sapien
acgaaacgtcactccgagag

SEQ ID NO: 6099837 - DNA, 20 bp, Homo sapien
ctctcggagtgacgtttcgt

SEQ ID NO: 6099838 - DNA, 20 bp, Homo sapien
acctgactaactatccgttg

SEQ ID NO: 6099839 - DNA, 20 bp, Homo sapien
caacggatagttagtcaggt

SEQ ID NO: 6099840 - DNA, 20 bp, Homo sapien
acctatctacacgtacaggg

SEQ ID NO: 6099841 - DNA, 20 bp, Homo sapien
ccctgtacgtgtagataggt

SEQ ID NO: 6099842 - DNA, 20 bp, Homo sapien
gcttcgagtgcattcagttc

SEQ ID NO: 6099843 - DNA, 20 bp, Homo sapien
gaactgaatgcactcgaagc

SEQ ID NO: 6099844 - DNA, 20 bp, Homo sapien
acctacatctacgatagcgt

SEQ ID NO: 6099845 - DNA, 20 bp, Homo sapien
acgctatcgtagatgtaggt

SEQ ID NO: 6099846 - DNA, 20 bp, Homo sapien
accgtagctctcggcaagat

SEQ ID NO: 6099847 - DNA, 20 bp, Homo sapien
atcttgccgagagctacggt

SEQ ID NO: 6099848 - DNA, 20 bp, Homo sapien
accgcgtgtaccacagtatt

SEQ ID NO: 6099849 - DNA, 20 bp, Homo sapien
aatactgtggtacacgcggt

SEQ ID NO: 6099850 - DNA, 20 bp, Homo sapien
accactatggacacgcggat

SEQ ID NO: 6099851 - DNA, 20 bp, Homo sapien
atccgcgtgtccatagtggt

SEQ ID NO: 6099852 - DNA, 20 bp, Homo sapien
accaatgaccatatacggcg

SEQ ID NO: 6099853 - DNA, 20 bp, Homo sapien
cgccgtatatggtcattggt

SEQ ID NO: 6099854 - DNA, 20 bp, Homo sapien
accaatatgaaacgctctcg

SEQ ID NO: 6099855 - DNA, 20 bp, Homo sapien
cgagagcgtttcatattggt

SEQ ID NO: 6099856 - DNA, 20 bp, Homo sapien
acattacggacggtcggcat

SEQ ID NO: 6099857 - DNA, 20 bp, Homo sapien
atgccgaccgtccgtaatgt

SEQ ID NO: 6099858 - DNA, 20 bp, Homo sapien
acagtcgcctagcggtatat

SEQ ID NO: 6099859 - DNA, 20 bp, Homo sapien
atataccgctaggcgactgt

SEQ ID NO: 6099860 - DNA, 20 bp, Homo sapien
acacaaagtcgatacgtccg

SEQ ID NO: 6099861 - DNA, 20 bp, Homo sapien
cggacgtatcgactttgtgt

SEQ ID NO: 6099862 - DNA, 20 bp, Homo sapien
acaagcgtgaccgaatcgag

SEQ ID NO: 6099863 - DNA, 20 bp, Homo sapien
ctcgattcggtcacgcttgt

SEQ ID NO: 6099864 - DNA, 20 bp, Homo sapien
gataagcgttcacagctcgg

SEQ ID NO: 6099865 - DNA, 20 bp, Homo sapien
ccgagctgtgaacgcttatc

SEQ ID NO: 6099866 - DNA, 20 bp, Homo sapien
acaacgtataatcgccgagc

SEQ ID NO: 6099867 - DNA, 20 bp, Homo sapien
gctcggcgattatacgttgt

SEQ ID NO: 6099868 - DNA, 20 bp, Homo sapien
acaacacgtcagaggtccgt

SEQ ID NO: 6099869 - DNA, 20 bp, Homo sapien
acggacctctgacgtgttgt

SEQ ID NO: 6099870 - DNA, 20 bp, Homo sapien
acaaacctgagagacgggct

SEQ ID NO: 6099871 - DNA, 20 bp, Homo sapien
agcccgtctctcaggtttgt

SEQ ID NO: 6099872 - DNA, 20 bp, Homo sapien
aattcgaggagtcaggtaca

SEQ ID NO: 6099873 - DNA, 20 bp, Homo sapien
tgtacctgactcctcgaatt

SEQ ID NO: 6099874 - DNA, 20 bp, Homo sapien
aattccgtgaactagagtcg

SEQ ID NO: 6099875 - DNA, 20 bp, Homo sapien
cgactctagttcacggaatt

SEQ ID NO: 6099876 - DNA, 20 bp, Homo sapien
aattaggcgacatcgggttt

SEQ ID NO: 6099877 - DNA, 20 bp, Homo sapien
aaacccgatgtcgcctaatt

SEQ ID NO: 6099878 - DNA, 20 bp, Homo sapien
aattacccgaactcgcatag

SEQ ID NO: 6099879 - DNA, 20 bp, Homo sapien
ctatgcgagttcgggtaatt

SEQ ID NO: 6099880 - DNA, 20 bp, Homo sapien
aattaccaccatcgcaaggt

SEQ ID NO: 6099881 - DNA, 20 bp, Homo sapien
accttgcgatggtggtaatt

SEQ ID NO: 6099882 - DNA, 20 bp, Homo sapien
aattaactgaagcgaggtcg

SEQ ID NO: 6099883 - DNA, 20 bp, Homo sapien
cgacctcgcttcagttaatt

SEQ ID NO: 6099884 - DNA, 20 bp, Homo sapien
aatgcgtcaacgtacctcga

SEQ ID NO: 6099885 - DNA, 20 bp, Homo sapien
tcgaggtacgttgacgcatt

SEQ ID NO: 6099886 - DNA, 20 bp, Homo sapien
gaccactgtatgatagtctg

SEQ ID NO: 6099887 - DNA, 20 bp, Homo sapien
cagactatcatacagtggtc

SEQ ID NO: 6099888 - DNA, 20 bp, Homo sapien
aatgcaaatataccggctcc

SEQ ID NO: 6099889 - DNA, 20 bp, Homo sapien
ggagccggtatatttgcatt

SEQ ID NO: 6099890 - DNA, 20 bp, Homo sapien
aatgatccaagtcgcgctag

SEQ ID NO: 6099891 - DNA, 20 bp, Homo sapien
ctagcgcgacttggatcatt

SEQ ID NO: 6099892 - DNA, 20 bp, Homo sapien
aatctatctacaagccggtc

SEQ ID NO: 6099893 - DNA, 20 bp, Homo sapien
gaccggcttgtagatagatt

SEQ ID NO: 6099894 - DNA, 20 bp, Homo sapien
aatcgtatgacacgcgcttg

SEQ ID NO: 6099895 - DNA, 20 bp, Homo sapien
caagcgcgtgtcatacgatt

SEQ ID NO: 6099896 - DNA, 20 bp, Homo sapien
aatcgtaggacagtatcccg

SEQ ID NO: 6099897 - DNA, 20 bp, Homo sapien
cgggatactgtcctacgatt

SEQ ID NO: 6099898 - DNA, 20 bp, Homo sapien
aatatctgaccacgccttgt

SEQ ID NO: 6099899 - DNA, 20 bp, Homo sapien
acaaggcgtggtcagatatt

SEQ ID NO: 6099900 - DNA, 20 bp, Homo sapien
aatatcgacagtacgagggt

SEQ ID NO: 6099901 - DNA, 20 bp, Homo sapien
accctcgtactgtcgatatt

SEQ ID NO: 6099902 - DNA, 20 bp, Homo sapien
aatagggctagtcccgctac

SEQ ID NO: 6099903 - DNA, 20 bp, Homo sapien
gtagcgggactagccctatt

SEQ ID NO: 6099904 - DNA, 20 bp, Homo sapien
aatagaatccctacgcctag

SEQ ID NO: 6099905 - DNA, 20 bp, Homo sapien
ctaggcgtagggattctatt

SEQ ID NO: 6099906 - DNA, 20 bp, Homo sapien
aatactgaactagactccgc

SEQ ID NO: 6099907 - DNA, 20 bp, Homo sapien
gcggagtctagttcagtatt

SEQ ID NO: 6099908 - DNA, 20 bp, Homo sapien
gaccacgctgtgcggatata

SEQ ID NO: 6099909 - DNA, 20 bp, Homo sapien
tatatccgcacagcgtggtc

SEQ ID NO: 6099910 - DNA, 20 bp, Homo sapien
aatacgactgacacgagctg

SEQ ID NO: 6099911 - DNA, 20 bp, Homo sapien
cagctcgtgtcagtcgtatt

SEQ ID NO: 6099912 - DNA, 20 bp, Homo sapien
aataccgctctcaacagtag

SEQ ID NO: 6099913 - DNA, 20 bp, Homo sapien
ctactgttgagagcggtatt

SEQ ID NO: 6099914 - DNA, 20 bp, Homo sapien
aagtgtgccagacgctcgaa

SEQ ID NO: 6099915 - DNA, 20 bp, Homo sapien
ttcgagcgtctggcacactt

SEQ ID NO: 6099916 - DNA, 20 bp, Homo sapien
aagtcgccgatccgctaaag

SEQ ID NO: 6099917 - DNA, 20 bp, Homo sapien
ctttagcggatcggcgactt

SEQ ID NO: 6099918 - DNA, 20 bp, Homo sapien
aagtcgaatacggtcagcgc

SEQ ID NO: 6099919 - DNA, 20 bp, Homo sapien
gcgctgaccgtattcgactt

SEQ ID NO: 6099920 - DNA, 20 bp, Homo sapien
aaggtatatgaccagccgtc

SEQ ID NO: 6099921 - DNA, 20 bp, Homo sapien
gacggctggtcatatacctt

SEQ ID NO: 6099922 - DNA, 20 bp, Homo sapien
aaggctagtcagctacgttt

SEQ ID NO: 6099923 - DNA, 20 bp, Homo sapien
aaacgtagctgactagcctt

SEQ ID NO: 6099924 - DNA, 20 bp, Homo sapien
aaggacgctatcgccgcaaa

SEQ ID NO: 6099925 - DNA, 20 bp, Homo sapien
tttgcggcgatagcgtcctt

SEQ ID NO: 6099926 - DNA, 20 bp, Homo sapien
aagcgcgataggtacgcact

SEQ ID NO: 6099927 - DNA, 20 bp, Homo sapien
agtgcgtacctatcgcgctt

SEQ ID NO: 6099928 - DNA, 20 bp, Homo sapien
aagcgacctagccgtacaga

SEQ ID NO: 6099929 - DNA, 20 bp, Homo sapien
tctgtacggctaggtcgctt

SEQ ID NO: 6099930 - DNA, 20 bp, Homo sapien
ctggctgtctagcactgtag

SEQ ID NO: 6099931 - DNA, 20 bp, Homo sapien
ctacagtgctagacagccag

SEQ ID NO: 6099932 - DNA, 20 bp, Homo sapien
cgtcgcgttagacagctcat

SEQ ID NO: 6099933 - DNA, 20 bp, Homo sapien
atgagctgtctaacgcgacg

SEQ ID NO: 6099934 - DNA, 20 bp, Homo sapien
aagatagcgtacagtcggca

SEQ ID NO: 6099935 - DNA, 20 bp, Homo sapien
tgccgactgtacgctatctt

SEQ ID NO: 6099936 - DNA, 20 bp, Homo sapien
aagactaatcgacgcctgcg

SEQ ID NO: 6099937 - DNA, 20 bp, Homo sapien
cgcaggcgtcgattagtctt

SEQ ID NO: 6099938 - DNA, 20 bp, Homo sapien
aagacgcctagcgcctaaga

SEQ ID NO: 6099939 - DNA, 20 bp, Homo sapien
tcttaggcgctaggcgtctt

SEQ ID NO: 6099940 - DNA, 20 bp, Homo sapien
aactcagtcccacgggttga

SEQ ID NO: 6099941 - DNA, 20 bp, Homo sapien
tcaacccgtgggactgagtt

SEQ ID NO: 6099942 - DNA, 20 bp, Homo sapien
aactagactatcgcccagag

SEQ ID NO: 6099943 - DNA, 20 bp, Homo sapien
ctctgggcgatagtctagtt

SEQ ID NO: 6099944 - DNA, 20 bp, Homo sapien
aacgatccgagtcagggcta

SEQ ID NO: 6099945 - DNA, 20 bp, Homo sapien
tagccctgactcggatcgtt

SEQ ID NO: 6099946 - DNA, 20 bp, Homo sapien
aacgacgatcaggtcatccg

SEQ ID NO: 6099947 - DNA, 20 bp, Homo sapien
cggatgacctgatcgtcgtt

SEQ ID NO: 6099948 - DNA, 20 bp, Homo sapien
aaccgtatcctcacgaagat

SEQ ID NO: 6099949 - DNA, 20 bp, Homo sapien
atcttcgtgaggatacggtt

SEQ ID NO: 6099950 - DNA, 20 bp, Homo sapien
aaccagactaggcccgtatg

SEQ ID NO: 6099951 - DNA, 20 bp, Homo sapien
catacgggcctagtctggtt

SEQ ID NO: 6099952 - DNA, 20 bp, Homo sapien
aaccacgtacctagagaggg

SEQ ID NO: 6099953 - DNA, 20 bp, Homo sapien
ccctctctaggtacgtggtt

SEQ ID NO: 6099954 - DNA, 20 bp, Homo sapien
cacgaccatgatcgacgaga

SEQ ID NO: 6099955 - DNA, 20 bp, Homo sapien
tctcgtcgatcatggtcgtg

SEQ ID NO: 6099956 - DNA, 20 bp, Homo sapien
aacataggtagccgggtcac

SEQ ID NO: 6099957 - DNA, 20 bp, Homo sapien
gtgacccggctacctatgtt

SEQ ID NO: 6099958 - DNA, 20 bp, Homo sapien
aacatagatcacgctccgtt

SEQ ID NO: 6099959 - DNA, 20 bp, Homo sapien
aacggagcgtgatctatgtt

SEQ ID NO: 6099960 - DNA, 20 bp, Homo sapien
aacagtgtaaacgcgaggct

SEQ ID NO: 6099961 - DNA, 20 bp, Homo sapien
agcctcgcgtttacactgtt

SEQ ID NO: 6099962 - DNA, 20 bp, Homo sapien
aacagtacgacgggtcagct

SEQ ID NO: 6099963 - DNA, 20 bp, Homo sapien
agctgacccgtcgtactgtt

SEQ ID NO: 6099964 - DNA, 20 bp, Homo sapien
aacaccgtccatacgaggtt

SEQ ID NO: 6099965 - DNA, 20 bp, Homo sapien
aacctcgtatggacggtgtt

SEQ ID NO: 6099966 - DNA, 20 bp, Homo sapien
aaattgcagacacgggtccg

SEQ ID NO: 6099967 - DNA, 20 bp, Homo sapien
cggacccgtgtctgcaattt

SEQ ID NO: 6099968 - DNA, 20 bp, Homo sapien
aaatcccgtccaatcgaagg

SEQ ID NO: 6099969 - DNA, 20 bp, Homo sapien
ccttcgattggacgggattt

SEQ ID NO: 6099970 - DNA, 20 bp, Homo sapien
aaatcagtcatacgagcgcc

SEQ ID NO: 6099971 - DNA, 20 bp, Homo sapien
ggcgctcgtatgactgattt

SEQ ID NO: 6099972 - DNA, 20 bp, Homo sapien
aaagggcctatcggcgacat

SEQ ID NO: 6099973 - DNA, 20 bp, Homo sapien
atgtcgccgataggcccttt

SEQ ID NO: 6099974 - DNA, 20 bp, Homo sapien
aaacgtctgccacacgatat

SEQ ID NO: 6099975 - DNA, 20 bp, Homo sapien
atatcgtgtggcagacgttt

SEQ ID NO: 6099976 - DNA, 20 bp, Homo sapien
atctatgagactcgatcctc

SEQ ID NO: 6099977 - DNA, 20 bp, Homo sapien
gaggatcgagtctcatagat

SEQ ID NO: 6099978 - DNA, 20 bp, Homo sapien
aaacgcctgaagcgatagtt

SEQ ID NO: 6099979 - DNA, 20 bp, Homo sapien
aactatcgcttcaggcgttt

SEQ ID NO: 6099980 - DNA, 20 bp, Homo sapien
aaacgacgtaggccggacat

SEQ ID NO: 6099981 - DNA, 20 bp, Homo sapien
atgtccggcctacgtcgttt

SEQ ID NO: 6099982 - DNA, 20 bp, Homo sapien
aaaccatcgactcacgggat

SEQ ID NO: 6099983 - DNA, 20 bp, Homo sapien
atcccgtgagtcgatggttt

SEQ ID NO: 6099984 - DNA, 20 bp, Homo sapien
aaaccatataccgagtccgg

SEQ ID NO: 6099985 - DNA, 20 bp, Homo sapien
ccggactcggtatatggttt

SEQ ID NO: 6099986 - DNA, 20 bp, Homo sapien
aaacagcgtcatcagcgtag

SEQ ID NO: 6099987 - DNA, 20 bp, Homo sapien
ctacgctgatgacgctgttt

SEQ ID NO: 6099988 - DNA, 20 bp, Homo sapien
aaacaatcgaagcccgtcgg

SEQ ID NO: 6099989 - DNA, 20 bp, Homo sapien
ccgacgggcttcgattgttt

SEQ ID NO: 6099990 - DNA, 20 bp, Homo sapien
ttgatatagtttcgggaccg

SEQ ID NO: 6099991 - DNA, 20 bp, Homo sapien
cggtcccgaaactatatcaa

SEQ ID NO: 6099992 - DNA, 20 bp, Homo sapien
ttatgctttctacgccgggc

SEQ ID NO: 6099993 - DNA, 20 bp, Homo sapien
gcccggcgtagaaagcataa

SEQ ID NO: 6099994 - DNA, 20 bp, Homo sapien
ttaaccgatttctcgcgtgg

SEQ ID NO: 6099995 - DNA, 20 bp, Homo sapien
ccacgcgagaaatcggttaa

SEQ ID NO: 6099996 - DNA, 20 bp, Homo sapien
tgattgggttgtcgcctcca

SEQ ID NO: 6099997 - DNA, 20 bp, Homo sapien
tggaggcgacaacccaatca

SEQ ID NO: 6099998 - DNA, 20 bp, Homo sapien
agcacgatgacggtgacata

SEQ ID NO: 6099999 - DNA, 20 bp, Homo sapien
tatgtcaccgtcatcgtgct

SEQ ID NO: 6100000 - DNA, 20 bp, Homo sapien
tgactatcttggtgtcgcgc

SEQ ID NO: 6100001 - DNA, 20 bp, Homo sapien
gcgcgacaccaagatagtca

SEQ ID NO: 6100002 - DNA, 20 bp, Homo sapien
tctgactttagatgtcgggc

SEQ ID NO: 6100003 - DNA, 20 bp, Homo sapien
gcccgacatctaaagtcaga

SEQ ID NO: 6100004 - DNA, 20 bp, Homo sapien
tacctctattgatacgtggg

SEQ ID NO: 6100005 - DNA, 20 bp, Homo sapien
cccacgtatcaatagaggta

SEQ ID NO: 6100006 - DNA, 20 bp, Homo sapien
tacccgcgttgggacagtat

SEQ ID NO: 6100007 - DNA, 20 bp, Homo sapien
atactgtcccaacgcgggta

SEQ ID NO: 6100008 - DNA, 20 bp, Homo sapien
taacgaagttgcccgtaatg

SEQ ID NO: 6100009 - DNA, 20 bp, Homo sapien
cattacgggcaacttcgtta

SEQ ID NO: 6100010 - DNA, 20 bp, Homo sapien
gttccgggttatgtgtccca

SEQ ID NO: 6100011 - DNA, 20 bp, Homo sapien
tgggacacataacccggaac

SEQ ID NO: 6100012 - DNA, 20 bp, Homo sapien
gtggctattgatgtcgtccc

SEQ ID NO: 6100013 - DNA, 20 bp, Homo sapien
gggacgacatcaatagccac

SEQ ID NO: 6100014 - DNA, 20 bp, Homo sapien
gtgattagttcgctgtccgc

SEQ ID NO: 6100015 - DNA, 20 bp, Homo sapien
gcggacagcgaactaatcac

SEQ ID NO: 6100016 - DNA, 20 bp, Homo sapien
gtgacgggtgttctacatct

SEQ ID NO: 6100017 - DNA, 20 bp, Homo sapien
agatgtagaacacccgtcac

SEQ ID NO: 6100018 - DNA, 20 bp, Homo sapien
gtcgccgattctagttatgg

SEQ ID NO: 6100019 - DNA, 20 bp, Homo sapien
ccataactagaatcggcgac

SEQ ID NO: 6100020 - DNA, 20 bp, Homo sapien
tgcgtggctttcactcgcta

SEQ ID NO: 6100021 - DNA, 20 bp, Homo sapien
tagcgagtgaaagccacgca

SEQ ID NO: 6100022 - DNA, 20 bp, Homo sapien
gtcaaatgttcgtatagggc

SEQ ID NO: 6100023 - DNA, 20 bp, Homo sapien
gccctatacgaacatttgac

SEQ ID NO: 6100024 - DNA, 20 bp, Homo sapien
gtattcgattctaggacctg

SEQ ID NO: 6100025 - DNA, 20 bp, Homo sapien
caggtcctagaatcgaatac

SEQ ID NO: 6100026 - DNA, 20 bp, Homo sapien
gtagaggcttcgtgtaactc

SEQ ID NO: 6100027 - DNA, 20 bp, Homo sapien
gagttacacgaagcctctac

SEQ ID NO: 6100028 - DNA, 20 bp, Homo sapien
gtaacctattcgtgactagc

SEQ ID NO: 6100029 - DNA, 20 bp, Homo sapien
gctagtcacgaataggttac

SEQ ID NO: 6100030 - DNA, 20 bp, Homo sapien
gggagtcgtgctctatattc

SEQ ID NO: 6100031 - DNA, 20 bp, Homo sapien
gaatatagagcacgactccc

SEQ ID NO: 6100032 - DNA, 20 bp, Homo sapien
gggaacgcttcgtaacgctt

SEQ ID NO: 6100033 - DNA, 20 bp, Homo sapien
aagcgttacgaagcgttccc

SEQ ID NO: 6100034 - DNA, 20 bp, Homo sapien
gctatgcgttccgatgctgt

SEQ ID NO: 6100035 - DNA, 20 bp, Homo sapien
acagcatcggaacgcatagc

SEQ ID NO: 6100036 - DNA, 20 bp, Homo sapien
gcgccctgtggtcgtataat

SEQ ID NO: 6100037 - DNA, 20 bp, Homo sapien
attatacgaccacagggcgc

SEQ ID NO: 6100038 - DNA, 20 bp, Homo sapien
gcgaaacatggtccggtatc

SEQ ID NO: 6100039 - DNA, 20 bp, Homo sapien
gataccggaccatgtttcgc

SEQ ID NO: 6100040 - DNA, 20 bp, Homo sapien
gccgacgcttcgacagaatt

SEQ ID NO: 6100041 - DNA, 20 bp, Homo sapien
aattctgtcgaagcgtcggc

SEQ ID NO: 6100042 - DNA, 20 bp, Homo sapien
tgcgtctatttagtggagcc

SEQ ID NO: 6100043 - DNA, 20 bp, Homo sapien
ggctccactaaatagacgca

SEQ ID NO: 6100044 - DNA, 20 bp, Homo sapien
gcatcgtattccagtcgtgg

SEQ ID NO: 6100045 - DNA, 20 bp, Homo sapien
ccacgactggaatacgatgc

SEQ ID NO: 6100046 - DNA, 20 bp, Homo sapien
gcaatccgttatgtaaaggg

SEQ ID NO: 6100047 - DNA, 20 bp, Homo sapien
ccctttacataacggattgc

SEQ ID NO: 6100048 - DNA, 20 bp, Homo sapien
gatttctcttactagaccgg

SEQ ID NO: 6100049 - DNA, 20 bp, Homo sapien
ccggtctagtaagagaaatc

SEQ ID NO: 6100050 - DNA, 20 bp, Homo sapien
gattaaattacgctctggcg

SEQ ID NO: 6100051 - DNA, 20 bp, Homo sapien
cgccagagcgtaatttaatc

SEQ ID NO: 6100052 - DNA, 20 bp, Homo sapien
gatagcttcagcgcactttg

SEQ ID NO: 6100053 - DNA, 20 bp, Homo sapien
caaagtgcgctgaagctatc

SEQ ID NO: 6100054 - DNA, 20 bp, Homo sapien
gagcatcgttatctaaaggg

SEQ ID NO: 6100055 - DNA, 20 bp, Homo sapien
ccctttagataacgatgctc

SEQ ID NO: 6100056 - DNA, 20 bp, Homo sapien
gacgcgcatgtgagcctata

SEQ ID NO: 6100057 - DNA, 20 bp, Homo sapien
tataggctcacatgcgcgtc

SEQ ID NO: 6100058 - DNA, 20 bp, Homo sapien
gacctgggtgtcgataccta

SEQ ID NO: 6100059 - DNA, 20 bp, Homo sapien
taggtatcgacacccaggtc

SEQ ID NO: 6100060 - DNA, 20 bp, Homo sapien
cttcgggtcgattcaccata

SEQ ID NO: 6100061 - DNA, 20 bp, Homo sapien
tatggtgaatcgacccgaag

SEQ ID NO: 6100062 - DNA, 20 bp, Homo sapien
cttacggctcgttactagga

SEQ ID NO: 6100063 - DNA, 20 bp, Homo sapien
tcctagtaacgagccgtaag

SEQ ID NO: 6100064 - DNA, 20 bp, Homo sapien
tagtcttcttgacgtgcagg

SEQ ID NO: 6100065 - DNA, 20 bp, Homo sapien
cctgcacgtcaagaagacta

SEQ ID NO: 6100066 - DNA, 20 bp, Homo sapien
ctctgacattagcgtatagg

SEQ ID NO: 6100067 - DNA, 20 bp, Homo sapien
cctatacgctaatgtcagag

SEQ ID NO: 6100068 - DNA, 20 bp, Homo sapien
ctcgctgatgctcggtgata

SEQ ID NO: 6100069 - DNA, 20 bp, Homo sapien
tatcaccgagcatcagcgag

SEQ ID NO: 6100070 - DNA, 20 bp, Homo sapien
ctcaacccttacgagaggtg

SEQ ID NO: 6100071 - DNA, 20 bp, Homo sapien
cacctctcgtaagggttgag

SEQ ID NO: 6100072 - DNA, 20 bp, Homo sapien
ctaggcggttaagcgtctct

SEQ ID NO: 6100073 - DNA, 20 bp, Homo sapien
agagacgcttaaccgcctag

SEQ ID NO: 6100074 - DNA, 20 bp, Homo sapien
ctacgatattagcataccgg

SEQ ID NO: 6100075 - DNA, 20 bp, Homo sapien
ccggtatgctaatatcgtag

SEQ ID NO: 6100076 - DNA, 20 bp, Homo sapien
ctaagcggttacacgcgatt

SEQ ID NO: 6100077 - DNA, 20 bp, Homo sapien
aatcgcgtgtaaccgcttag

SEQ ID NO: 6100078 - DNA, 20 bp, Homo sapien
cgtcggctgtaggccaatat

SEQ ID NO: 6100079 - DNA, 20 bp, Homo sapien
atattggcctacagccgacg

SEQ ID NO: 6100080 - DNA, 20 bp, Homo sapien
cgtatatctatggtaagcgc

SEQ ID NO: 6100081 - DNA, 20 bp, Homo sapien
gcgcttaccatagatatacg

SEQ ID NO: 6100082 - DNA, 20 bp, Homo sapien
cgggctagttaccgacgtat

SEQ ID NO: 6100083 - DNA, 20 bp, Homo sapien
atacgtcggtaactagcccg

SEQ ID NO: 6100084 - DNA, 20 bp, Homo sapien
cggctcagtggtacgacata

SEQ ID NO: 6100085 - DNA, 20 bp, Homo sapien
tatgtcgtaccactgagccg

SEQ ID NO: 6100086 - DNA, 20 bp, Homo sapien
gtgatgttgcacgatgtctc

SEQ ID NO: 6100087 - DNA, 20 bp, Homo sapien
gagacatcgtgcaacatcac

SEQ ID NO: 6100088 - DNA, 20 bp, Homo sapien
cggcgagctggtatcactat

SEQ ID NO: 6100089 - DNA, 20 bp, Homo sapien
atagtgataccagctcgccg

SEQ ID NO: 6100090 - DNA, 20 bp, Homo sapien
cgcggtcatcgtgcgaataa

SEQ ID NO: 6100091 - DNA, 20 bp, Homo sapien
ttattcgcacgatgaccgcg

SEQ ID NO: 6100092 - DNA, 20 bp, Homo sapien
cgccctagtgctgcaaatgt

SEQ ID NO: 6100093 - DNA, 20 bp, Homo sapien
acatttgcagcactagggcg

SEQ ID NO: 6100094 - DNA, 20 bp, Homo sapien
cgcaccgcttacaaagggtt

SEQ ID NO: 6100095 - DNA, 20 bp, Homo sapien
aaccctttgtaagcggtgcg

SEQ ID NO: 6100096 - DNA, 20 bp, Homo sapien
cgcaatcctggtatcagatg

SEQ ID NO: 6100097 - DNA, 20 bp, Homo sapien
catctgataccaggattgcg

SEQ ID NO: 6100098 - DNA, 20 bp, Homo sapien
cgattcgtgcagatgcgttt

SEQ ID NO: 6100099 - DNA, 20 bp, Homo sapien
aaacgcatctgcacgaatcg

SEQ ID NO: 6100100 - DNA, 20 bp, Homo sapien
cctagacttaacgcgctggt

SEQ ID NO: 6100101 - DNA, 20 bp, Homo sapien
accagcgcgttaagtctagg

SEQ ID NO: 6100102 - DNA, 20 bp, Homo sapien
ccgaccgtgtactagcatat

SEQ ID NO: 6100103 - DNA, 20 bp, Homo sapien
atatgctagtacacggtcgg

SEQ ID NO: 6100104 - DNA, 20 bp, Homo sapien
cccgatattactcgaactga

SEQ ID NO: 6100105 - DNA, 20 bp, Homo sapien
tcagttcgagtaatatcggg

SEQ ID NO: 6100106 - DNA, 20 bp, Homo sapien
cccaccgggtacgatagatt

SEQ ID NO: 6100107 - DNA, 20 bp, Homo sapien
aatctatcgtacccggtggg

SEQ ID NO: 6100108 - DNA, 20 bp, Homo sapien
gtgatgcgttctgatacatg

SEQ ID NO: 6100109 - DNA, 20 bp, Homo sapien
catgtatcagaacgcatcac

SEQ ID NO: 6100110 - DNA, 20 bp, Homo sapien
ccatccgattaaataccgtg

SEQ ID NO: 6100111 - DNA, 20 bp, Homo sapien
cacggtatttaatcggatgg

SEQ ID NO: 6100112 - DNA, 20 bp, Homo sapien
cattatgcgatagtcgtctg

SEQ ID NO: 6100113 - DNA, 20 bp, Homo sapien
cagacgactatcgcataatg

SEQ ID NO: 6100114 - DNA, 20 bp, Homo sapien
catcggaatgtaaccgtctc

SEQ ID NO: 6100115 - DNA, 20 bp, Homo sapien
gagacggttacattccgatg

SEQ ID NO: 6100116 - DNA, 20 bp, Homo sapien
cacgcaagtgtaccggcata

SEQ ID NO: 6100117 - DNA, 20 bp, Homo sapien
tatgccggtacacttgcgtg

SEQ ID NO: 6100118 - DNA, 20 bp, Homo sapien
cacgaaatgatcgcctcggt

SEQ ID NO: 6100119 - DNA, 20 bp, Homo sapien
accgaggcgatcatttcgtg

SEQ ID NO: 6100120 - DNA, 20 bp, Homo sapien
cacacccgtgcataaggtat

SEQ ID NO: 6100121 - DNA, 20 bp, Homo sapien
ataccttatgcacgggtgtg

SEQ ID NO: 6100122 - DNA, 20 bp, Homo sapien
caatagcgtggactccgcat

SEQ ID NO: 6100123 - DNA, 20 bp, Homo sapien
atgcggagtccacgctattg

SEQ ID NO: 6100124 - DNA, 20 bp, Homo sapien
caaatccgtgctacgacata

SEQ ID NO: 6100125 - DNA, 20 bp, Homo sapien
tatgtcgtagcacggatttg

SEQ ID NO: 6100126 - DNA, 20 bp, Homo sapien
atttcgtgaatactgagccg

SEQ ID NO: 6100127 - DNA, 20 bp, Homo sapien
cggctcagtattcacgaaat

SEQ ID NO: 6100128 - DNA, 20 bp, Homo sapien
attcccgctactcggataga

SEQ ID NO: 6100129 - DNA, 20 bp, Homo sapien
tctatccgagtagcgggaat

SEQ ID NO: 6100130 - DNA, 20 bp, Homo sapien
cgctcgcatgatatgtattg

SEQ ID NO: 6100131 - DNA, 20 bp, Homo sapien
caatacatatcatgcgagcg

SEQ ID NO: 6100132 - DNA, 20 bp, Homo sapien
atcacgagtgcatcgggtca

SEQ ID NO: 6100133 - DNA, 20 bp, Homo sapien
tgacccgatgcactcgtgat

SEQ ID NO: 6100134 - DNA, 20 bp, Homo sapien
agttacgtgactcgggctct

SEQ ID NO: 6100135 - DNA, 20 bp, Homo sapien
agagcccgagtcacgtaact

SEQ ID NO: 6100136 - DNA, 20 bp, Homo sapien
agccggatgcgacacgtaat

SEQ ID NO: 6100137 - DNA, 20 bp, Homo sapien
attacgtgtcgcatccggct

SEQ ID NO: 6100138 - DNA, 20 bp, Homo sapien
agagtgtaccgacctcgtaa

SEQ ID NO: 6100139 - DNA, 20 bp, Homo sapien
ttacgaggtcggtacactct

SEQ ID NO: 6100140 - DNA, 20 bp, Homo sapien
actctatatcatacgccggt

SEQ ID NO: 6100141 - DNA, 20 bp, Homo sapien
accggcgtatgatatagagt

SEQ ID NO: 6100142 - DNA, 20 bp, Homo sapien
acaacaatggaaccctcggg

SEQ ID NO: 6100143 - DNA, 20 bp, Homo sapien
cccgagggttccattgttgt

SEQ ID NO: 6100144 - DNA, 20 bp, Homo sapien
aatacgcggatctcgtcaca

SEQ ID NO: 6100145 - DNA, 20 bp, Homo sapien
tgtgacgagatccgcgtatt

SEQ ID NO: 6100146 - DNA, 20 bp, Homo sapien
aagcacctgaacgcctagat

SEQ ID NO: 6100147 - DNA, 20 bp, Homo sapien
atctaggcgttcaggtgctt

SEQ ID NO: 6100148 - DNA, 20 bp, Homo sapien
aacccggtgacgcgagaaat

SEQ ID NO: 6100149 - DNA, 20 bp, Homo sapien
atttctcgcgtcaccgggtt

SEQ ID NO: 6100150 - DNA, 20 bp, Homo sapien
aaatagcatcgaccgacggg

SEQ ID NO: 6100151 - DNA, 20 bp, Homo sapien
cccgtcggtcgatgctattt

SEQ ID NO: 6100152 - DNA, 20 bp, Homo sapien
cgctcagatgctggagatat

SEQ ID NO: 6100153 - DNA, 20 bp, Homo sapien
atatctccagcatctgagcg

SEQ ID NO: 6100154 - DNA, 20 bp, Homo sapien
cgtcgatctcgtctcatagt

SEQ ID NO: 6100155 - DNA, 20 bp, Homo sapien
actatgagacgagatcgacg

SEQ ID NO: 6100156 - DNA, 20 bp, Homo sapien
aaacgacctcatacgcgagt

SEQ ID NO: 6100157 - DNA, 20 bp, Homo sapien
actcgcgtatgaggtcgttt

SEQ ID NO: 6100158 - DNA, 20 bp, Homo sapien
catgtatagacagtgcgcgt

SEQ ID NO: 6100159 - DNA, 20 bp, Homo sapien
acgcgcactgtctatacatg

SEQ ID NO: 6100160 - DNA, 20 bp, Homo sapien
catgtagagcactcgtctcg

SEQ ID NO: 6100161 - DNA, 20 bp, Homo sapien
cgagacgagtgctctacatg

SEQ ID NO: 6100162 - DNA, 20 bp, Homo sapien
cacctcactgcatagagatt

SEQ ID NO: 6100163 - DNA, 20 bp, Homo sapien
aatctctatgcagtgaggtg

SEQ ID NO: 6100164 - DNA, 20 bp, Homo sapien
tgcgtcagtttcagtatagg

SEQ ID NO: 6100165 - DNA, 20 bp, Homo sapien
cctatactgaaactgacgca

SEQ ID NO: 6100166 - DNA, 20 bp, Homo sapien
tcgatatagttcgttcgcag

SEQ ID NO: 6100167 - DNA, 20 bp, Homo sapien
ctgcgaacgaactatatcga

SEQ ID NO: 6100168 - DNA, 20 bp, Homo sapien
tagtccagttgattagtggc

SEQ ID NO: 6100169 - DNA, 20 bp, Homo sapien
gccactaatcaactggacta

SEQ ID NO: 6100170 - DNA, 20 bp, Homo sapien
gagtgctgtaggtcctcata

SEQ ID NO: 6100171 - DNA, 20 bp, Homo sapien
tatgaggacctacagcactc

SEQ ID NO: 6100172 - DNA, 20 bp, Homo sapien
gacatcgcttcaagagtatg

SEQ ID NO: 6100173 - DNA, 20 bp, Homo sapien
catactcttgaagcgatgtc

SEQ ID NO: 6100174 - DNA, 20 bp, Homo sapien
ctggcagttagcgcagtcta

SEQ ID NO: 6100175 - DNA, 20 bp, Homo sapien
tagactgcgctaactgccag

SEQ ID NO: 6100176 - DNA, 20 bp, Homo sapien
ctggacattactctctatgc

SEQ ID NO: 6100177 - DNA, 20 bp, Homo sapien
gcatagagagtaatgtccag

SEQ ID NO: 6100178 - DNA, 20 bp, Homo sapien
cgtcctctgcctgatatgat

SEQ ID NO: 6100179 - DNA, 20 bp, Homo sapien
atcatatcaggcagaggacg

SEQ ID NO: 6100180 - DNA, 20 bp, Homo sapien
atcggtggcatcgactagca

SEQ ID NO: 6100181 - DNA, 20 bp, Homo sapien
tgctagtcgatgccaccgat

SEQ ID NO: 6100182 - DNA, 20 bp, Homo sapien
tcgagctatgttgcgatctc

SEQ ID NO: 6100183 - DNA, 20 bp, Homo sapien
gagatcgcaacatagctcga

SEQ ID NO: 6100184 - DNA, 20 bp, Homo sapien
tcgagcgatttatacatccg

SEQ ID NO: 6100185 - DNA, 20 bp, Homo sapien
cggatgtataaatcgctcga

SEQ ID NO: 6100186 - DNA, 20 bp, Homo sapien
tagtcaggttggatgtctac

SEQ ID NO: 6100187 - DNA, 20 bp, Homo sapien
gtagacatccaacctgacta

SEQ ID NO: 6100188 - DNA, 20 bp, Homo sapien
gcttactattcatactgccg

SEQ ID NO: 6100189 - DNA, 20 bp, Homo sapien
cggcagtatgaatagtaagc

SEQ ID NO: 6100190 - DNA, 20 bp, Homo sapien
gctgttatgaactgtcgtgc

SEQ ID NO: 6100191 - DNA, 20 bp, Homo sapien
gcacgacagttcataacagc

SEQ ID NO: 6100192 - DNA, 20 bp, Homo sapien
gagtgctattcaggacgtat

SEQ ID NO: 6100193 - DNA, 20 bp, Homo sapien
atacgtcctgaatagcactc

SEQ ID NO: 6100194 - DNA, 20 bp, Homo sapien
gacatcactgtatatctcgc

SEQ ID NO: 6100195 - DNA, 20 bp, Homo sapien
gcgagatatacagtgatgtc

SEQ ID NO: 6100196 - DNA, 20 bp, Homo sapien
gacatacttccacgacatga

SEQ ID NO: 6100197 - DNA, 20 bp, Homo sapien
tcatgtcgtggaagtatgtc

SEQ ID NO: 6100198 - DNA, 20 bp, Homo sapien
ctggaatgtgaccgtgctct

SEQ ID NO: 6100199 - DNA, 20 bp, Homo sapien
agagcacggtcacattccag

SEQ ID NO: 6100200 - DNA, 20 bp, Homo sapien
cagacacgtatctcgcagta

SEQ ID NO: 6100201 - DNA, 20 bp, Homo sapien
tactgcgagatacgtgtctg

SEQ ID NO: 6100202 - DNA, 20 bp, Homo sapien
cgctacgattactacacatg

SEQ ID NO: 6100203 - DNA, 20 bp, Homo sapien
catgtgtagtaatcgtagcg

SEQ ID NO: 6100204 - DNA, 20 bp, Homo sapien
cgctaccatgatctagtcgt

SEQ ID NO: 6100205 - DNA, 20 bp, Homo sapien
acgactagatcatggtagcg

SEQ ID NO: 6100206 - DNA, 20 bp, Homo sapien
atcgggcctgctacatcagt

SEQ ID NO: 6100207 - DNA, 20 bp, Homo sapien
actgatgtagcaggcccgat

SEQ ID NO: 6100208 - DNA, 20 bp, Homo sapien
agcaacgctggatacgcatc

SEQ ID NO: 6100209 - DNA, 20 bp, Homo sapien
gatgcgtatccagcgttgct

SEQ ID NO: 6100210 - DNA, 20 bp, Homo sapien
agcaaatggacagcgcgact

SEQ ID NO: 6100211 - DNA, 20 bp, Homo sapien
agtcgcgctgtccatttgct

SEQ ID NO: 6100212 - DNA, 20 bp, Homo sapien
tgcgcgtgttgtcctctgaa

SEQ ID NO: 6100213 - DNA, 20 bp, Homo sapien
ttcagaggacaacacgcgca

SEQ ID NO: 6100214 - DNA, 20 bp, Homo sapien
tcgactgctttagaagtgtg

SEQ ID NO: 6100215 - DNA, 20 bp, Homo sapien
cacacttctaaagcagtcga

SEQ ID NO: 6100216 - DNA, 20 bp, Homo sapien
tcgactaggttcgttgcatg

SEQ ID NO: 6100217 - DNA, 20 bp, Homo sapien
catgcaacgaacctagtcga

SEQ ID NO: 6100218 - DNA, 20 bp, Homo sapien
cgcgtgcgtgagtctacatt

SEQ ID NO: 6100219 - DNA, 20 bp, Homo sapien
aatgtagactcacgcacgcg

SEQ ID NO: 6100220 - DNA, 20 bp, Homo sapien
atcgctcatcgtgaagctat

SEQ ID NO: 6100221 - DNA, 20 bp, Homo sapien
atagcttcacgatgagcgat

SEQ ID NO: 6100222 - DNA, 20 bp, Homo sapien
agcgatctgcgagaccgtat

SEQ ID NO: 6100223 - DNA, 20 bp, Homo sapien
atacggtctcgcagatcgct

SEQ ID NO: 6100224 - DNA, 20 bp, Homo sapien
agatgtcacacagtctcact

SEQ ID NO: 6100225 - DNA, 20 bp, Homo sapien
agtgagactgtgtgacatct

SEQ ID NO: 6100226 - DNA, 20 bp, Homo sapien
ttctgtgatttgagacgagc

SEQ ID NO: 6100227 - DNA, 20 bp, Homo sapien
gctcgtctcaaatcacagaa

SEQ ID NO: 6100228 - DNA, 20 bp, Homo sapien
tgcgccgatttccatctatg

SEQ ID NO: 6100229 - DNA, 20 bp, Homo sapien
catagatggaaatcggcgca

SEQ ID NO: 6100230 - DNA, 20 bp, Homo sapien
gtgacagattctatgtgtgc

SEQ ID NO: 6100231 - DNA, 20 bp, Homo sapien
gcacacatagaatctgtcac

SEQ ID NO: 6100232 - DNA, 20 bp, Homo sapien
gagtctctgtactgtgagct

SEQ ID NO: 6100233 - DNA, 20 bp, Homo sapien
agctcacagtacagagactc

SEQ ID NO: 6100234 - DNA, 20 bp, Homo sapien
gagtctactgtcgctgcgta

SEQ ID NO: 6100235 - DNA, 20 bp, Homo sapien
tacgcagcgacagtagactc

SEQ ID NO: 6100236 - DNA, 20 bp, Homo sapien
gacagcgcgtgaagtatcct

SEQ ID NO: 6100237 - DNA, 20 bp, Homo sapien
aggatacttcacgcgctgtc

SEQ ID NO: 6100238 - DNA, 20 bp, Homo sapien
gacagcgatgtgagcactct

SEQ ID NO: 6100239 - DNA, 20 bp, Homo sapien
agagtgctcacatcgctgtc

SEQ ID NO: 6100240 - DNA, 20 bp, Homo sapien
ctgctcttacctgatgtgca

SEQ ID NO: 6100241 - DNA, 20 bp, Homo sapien
tgcacatcaggtaagagcag

SEQ ID NO: 6100242 - DNA, 20 bp, Homo sapien
catgctcgtcaactcgtatt

SEQ ID NO: 6100243 - DNA, 20 bp, Homo sapien
aatacgagttgacgagcatg

SEQ ID NO: 6100244 - DNA, 20 bp, Homo sapien
ggcacgcatgtgtatctagt

SEQ ID NO: 6100245 - DNA, 20 bp, Homo sapien
actagatacacatgcgtgcc

SEQ ID NO: 6100246 - DNA, 20 bp, Homo sapien
caccacagtgactatgcagt

SEQ ID NO: 6100247 - DNA, 20 bp, Homo sapien
actgcatagtcactgtggtg

SEQ ID NO: 6100248 - DNA, 20 bp, Homo sapien
atcgagcgtagtgactgcct

SEQ ID NO: 6100249 - DNA, 20 bp, Homo sapien
aggcagtcactacgctcgat

SEQ ID NO: 6100250 - DNA, 20 bp, Homo sapien
agatcgcagggtatcgcatc

SEQ ID NO: 6100251 - DNA, 20 bp, Homo sapien
gatgcgataccctgcgatct

SEQ ID NO: 6100252 - DNA, 20 bp, Homo sapien
taggtctcttgcactctagg

SEQ ID NO: 6100253 - DNA, 20 bp, Homo sapien
cctagagtgcaagagaccta

SEQ ID NO: 6100254 - DNA, 20 bp, Homo sapien
gcatgtcattcatactacgg

SEQ ID NO: 6100255 - DNA, 20 bp, Homo sapien
ccgtagtatgaatgacatgc

SEQ ID NO: 6100256 - DNA, 20 bp, Homo sapien
ctgcgtggtgtccgatcata

SEQ ID NO: 6100257 - DNA, 20 bp, Homo sapien
tatgatcggacaccacgcag

SEQ ID NO: 6100258 - DNA, 20 bp, Homo sapien
ctgcgtactgtataaggatg

SEQ ID NO: 6100259 - DNA, 20 bp, Homo sapien
catccttatacagtacgcag

SEQ ID NO: 6100260 - DNA, 20 bp, Homo sapien
cgcgcatatcgagaggtatc

SEQ ID NO: 6100261 - DNA, 20 bp, Homo sapien
gatacctctcgatatgcgcg

SEQ ID NO: 6100262 - DNA, 20 bp, Homo sapien
catgctatgcactgatctcg

SEQ ID NO: 6100263 - DNA, 20 bp, Homo sapien
cgagatcagtgcatagcatg

SEQ ID NO: 6100264 - DNA, 20 bp, Homo sapien
cacatgatacatcgctctag

SEQ ID NO: 6100265 - DNA, 20 bp, Homo sapien
ctagagcgatgtatcatgtg

SEQ ID NO: 6100266 - DNA, 20 bp, Homo sapien
gcctcatgtggtctaggtct

SEQ ID NO: 6100267 - DNA, 20 bp, Homo sapien
agacctagaccacatgaggc

SEQ ID NO: 6100268 - DNA, 20 bp, Homo sapien
cacatctctatatcgtagcg

SEQ ID NO: 6100269 - DNA, 20 bp, Homo sapien
cgctacgatatagagatgtg

SEQ ID NO: 6100270 - DNA, 20 bp, Homo sapien
agatatgcgagcacgttcct

SEQ ID NO: 6100271 - DNA, 20 bp, Homo sapien
aggaacgtgctcgcatatct

SEQ ID NO: 6100272 - DNA, 20 bp, Homo sapien
gtctgcgcttctattcaagg

SEQ ID NO: 6100273 - DNA, 20 bp, Homo sapien
ccttgaatagaagcgcagac

SEQ ID NO: 6100274 - DNA, 20 bp, Homo sapien
ctgcgctctagttacatcat

SEQ ID NO: 6100275 - DNA, 20 bp, Homo sapien
atgatgtaactagagcgcag

SEQ ID NO: 6100276 - DNA, 20 bp, Homo sapien
ctgcgcggttagcacgatat

SEQ ID NO: 6100277 - DNA, 20 bp, Homo sapien
atatcgtgctaaccgcgcag

SEQ ID NO: 6100278 - DNA, 20 bp, Homo sapien
ctgcgcgattatgacagtgt

SEQ ID NO: 6100279 - DNA, 20 bp, Homo sapien
acactgtcataatcgcgcag

SEQ ID NO: 6100280 - DNA, 20 bp, Homo sapien
cgcgcacttaggacactgat

SEQ ID NO: 6100281 - DNA, 20 bp, Homo sapien
atcagtgtcctaagtgcgcg

SEQ ID NO: 6100282 - DNA, 20 bp, Homo sapien
cacatcgagtcagtcgtagt

SEQ ID NO: 6100283 - DNA, 20 bp, Homo sapien
actacgactgactcgatgtg

SEQ ID NO: 6100284 - DNA, 20 bp, Homo sapien
cacatccctgagcatagtga

SEQ ID NO: 6100285 - DNA, 20 bp, Homo sapien
tcactatgctcagggatgtg

SEQ ID NO: 6100286 - DNA, 20 bp, Homo sapien
atcgaacatgacgctgactg

SEQ ID NO: 6100287 - DNA, 20 bp, Homo sapien
cagtcagcgtcatgttcgat

SEQ ID NO: 6100288 - DNA, 20 bp, Homo sapien
gatctacattcatcgacctg

SEQ ID NO: 6100289 - DNA, 20 bp, Homo sapien
caggtcgatgaatgtagatc

SEQ ID NO: 6100290 - DNA, 20 bp, Homo sapien
agataggtgacgcctgctca

SEQ ID NO: 6100291 - DNA, 20 bp, Homo sapien
tgagcaggcgtcacctatct

SEQ ID NO: 6100292 - DNA, 20 bp, Homo sapien
taggacttgcgtctctgtgc

SEQ ID NO: 6100293 - DNA, 20 bp, Homo sapien
gcacagagacgcaagtccta

SEQ ID NO: 6100294 - DNA, 20 bp, Homo sapien
gtctgacttgagttacatgg

SEQ ID NO: 6100295 - DNA, 20 bp, Homo sapien
ccatgtaactcaagtcagac

SEQ ID NO: 6100296 - DNA, 20 bp, Homo sapien
gctgggtgtgatcctctcta

SEQ ID NO: 6100297 - DNA, 20 bp, Homo sapien
tagagaggatcacacccagc

SEQ ID NO: 6100298 - DNA, 20 bp, Homo sapien
cgcctgtcgagaggatcata

SEQ ID NO: 6100299 - DNA, 20 bp, Homo sapien
tatgatcctctcgacaggcg

SEQ ID NO: 6100300 - DNA, 20 bp, Homo sapien
cacatagctctccgaataag

SEQ ID NO: 6100301 - DNA, 20 bp, Homo sapien
cttattcggagagctatgtg

SEQ ID NO: 6100302 - DNA, 20 bp, Homo sapien
cacatagatcgacgtgcgtg

SEQ ID NO: 6100303 - DNA, 20 bp, Homo sapien
cacgcacgtcgatctatgtg

SEQ ID NO: 6100304 - DNA, 20 bp, Homo sapien
atccggtctcatcgctgaat

SEQ ID NO: 6100305 - DNA, 20 bp, Homo sapien
attcagcgatgagaccggat

SEQ ID NO: 6100306 - DNA, 20 bp, Homo sapien
atccgcgatcctgagcaata

SEQ ID NO: 6100307 - DNA, 20 bp, Homo sapien
tattgctcaggatcgcggat

SEQ ID NO: 6100308 - DNA, 20 bp, Homo sapien
agatagagtcgatgccagct

SEQ ID NO: 6100309 - DNA, 20 bp, Homo sapien
agctggcatcgactctatct

SEQ ID NO: 6100310 - DNA, 20 bp, Homo sapien
gatcggcttatgacgtatgt

SEQ ID NO: 6100311 - DNA, 20 bp, Homo sapien
acatacgtcataagccgatc

SEQ ID NO: 6100312 - DNA, 20 bp, Homo sapien
tcctctcgttggatgtgagc

SEQ ID NO: 6100313 - DNA, 20 bp, Homo sapien
gctcacatccaacgagagga

SEQ ID NO: 6100314 - DNA, 20 bp, Homo sapien
gtctcgtcttcgtgagtgca

SEQ ID NO: 6100315 - DNA, 20 bp, Homo sapien
tgcactcacgaagacgagac

SEQ ID NO: 6100316 - DNA, 20 bp, Homo sapien
gcatctccttcactatgagt

SEQ ID NO: 6100317 - DNA, 20 bp, Homo sapien
actcatagtgaaggagatgc

SEQ ID NO: 6100318 - DNA, 20 bp, Homo sapien
ctgcctgctgtagactcgta

SEQ ID NO: 6100319 - DNA, 20 bp, Homo sapien
tacgagtctacagcaggcag

SEQ ID NO: 6100320 - DNA, 20 bp, Homo sapien
ctgccgcgttagcgagatat

SEQ ID NO: 6100321 - DNA, 20 bp, Homo sapien
atatctcgctaacgcggcag

SEQ ID NO: 6100322 - DNA, 20 bp, Homo sapien
catgcagctcgatctagcga

SEQ ID NO: 6100323 - DNA, 20 bp, Homo sapien
tcgctagatcgagctgcatg

SEQ ID NO: 6100324 - DNA, 20 bp, Homo sapien
cacataatctcggtcggctg

SEQ ID NO: 6100325 - DNA, 20 bp, Homo sapien
cagccgaccgagattatgtg

SEQ ID NO: 6100326 - DNA, 20 bp, Homo sapien
agagtctataagcatcgtcg

SEQ ID NO: 6100327 - DNA, 20 bp, Homo sapien
cgacgatgcttatagactct

SEQ ID NO: 6100328 - DNA, 20 bp, Homo sapien
tgcctagctttccatatcgg

SEQ ID NO: 6100329 - DNA, 20 bp, Homo sapien
ccgatatggaaagctaggca

SEQ ID NO: 6100330 - DNA, 20 bp, Homo sapien
tgccgctctttatgctacgg

SEQ ID NO: 6100331 - DNA, 20 bp, Homo sapien
ccgtagcataaagagcggca

SEQ ID NO: 6100332 - DNA, 20 bp, Homo sapien
cttccgggcatgtgagatat

SEQ ID NO: 6100333 - DNA, 20 bp, Homo sapien
atatctcacatgcccggaag

SEQ ID NO: 6100334 - DNA, 20 bp, Homo sapien
tttagtcgtttgcccgaggc

SEQ ID NO: 6100335 - DNA, 20 bp, Homo sapien
gcctcgggcaaacgactaaa

SEQ ID NO: 6100336 - DNA, 20 bp, Homo sapien
tcctaatcttggatgcgtgg

SEQ ID NO: 6100337 - DNA, 20 bp, Homo sapien
ccacgcatccaagattagga

SEQ ID NO: 6100338 - DNA, 20 bp, Homo sapien
tagctccattgcggtatatg

SEQ ID NO: 6100339 - DNA, 20 bp, Homo sapien
catataccgcaatggagcta

SEQ ID NO: 6100340 - DNA, 20 bp, Homo sapien
tagctcagttggccggatct

SEQ ID NO: 6100341 - DNA, 20 bp, Homo sapien
agatccggccaactgagcta

SEQ ID NO: 6100342 - DNA, 20 bp, Homo sapien
gtctaggattctcgtcaatg

SEQ ID NO: 6100343 - DNA, 20 bp, Homo sapien
cattgacgagaatcctagac

SEQ ID NO: 6100344 - DNA, 20 bp, Homo sapien
catgcaactgtcagacgtgt

SEQ ID NO: 6100345 - DNA, 20 bp, Homo sapien
acacgtctgacagttgcatg

SEQ ID NO: 6100346 - DNA, 20 bp, Homo sapien
atcccatgactactcgtgag

SEQ ID NO: 6100347 - DNA, 20 bp, Homo sapien
ctcacgagtagtcatgggat

SEQ ID NO: 6100348 - DNA, 20 bp, Homo sapien
atccatgtcacgacctatga

SEQ ID NO: 6100349 - DNA, 20 bp, Homo sapien
tcataggtcgtgacatggat

SEQ ID NO: 6100350 - DNA, 20 bp, Homo sapien
tgccgcgctttcgcagtatt

SEQ ID NO: 6100351 - DNA, 20 bp, Homo sapien
aatactgcgaaagcgcggca

SEQ ID NO: 6100352 - DNA, 20 bp, Homo sapien
tgcccgagtttcatactatc

SEQ ID NO: 6100353 - DNA, 20 bp, Homo sapien
gatagtatgaaactcgggca

SEQ ID NO: 6100354 - DNA, 20 bp, Homo sapien
gtctacagttctgcgcctga

SEQ ID NO: 6100355 - DNA, 20 bp, Homo sapien
tcaggcgcagaactgtagac

SEQ ID NO: 6100356 - DNA, 20 bp, Homo sapien
cgtccagatgctgcgtacta

SEQ ID NO: 6100357 - DNA, 20 bp, Homo sapien
tagtacgcagcatctggacg

SEQ ID NO: 6100358 - DNA, 20 bp, Homo sapien
gctgctgcttcgacgtactt

SEQ ID NO: 6100359 - DNA, 20 bp, Homo sapien
aagtacgtcgaagcagcagc

SEQ ID NO: 6100360 - DNA, 20 bp, Homo sapien
gctgctcgtggttaagctct

SEQ ID NO: 6100361 - DNA, 20 bp, Homo sapien
agagcttaaccacgagcagc

SEQ ID NO: 6100362 - DNA, 20 bp, Homo sapien
gcatcctgtgctcgcatata

SEQ ID NO: 6100363 - DNA, 20 bp, Homo sapien
tatatgcgagcacaggatgc

SEQ ID NO: 6100364 - DNA, 20 bp, Homo sapien
ctgcatcattagtacagagg

SEQ ID NO: 6100365 - DNA, 20 bp, Homo sapien
cctctgtactaatgatgcag

SEQ ID NO: 6100366 - DNA, 20 bp, Homo sapien
cgccaacgtgagcatcgtat

SEQ ID NO: 6100367 - DNA, 20 bp, Homo sapien
atacgatgctcacgttggcg

SEQ ID NO: 6100368 - DNA, 20 bp, Homo sapien
catgatcgtatagtagctgc

SEQ ID NO: 6100369 - DNA, 20 bp, Homo sapien
gcagctactatacgatcatg

SEQ ID NO: 6100370 - DNA, 20 bp, Homo sapien
catgagtgtcacgctctcga

SEQ ID NO: 6100371 - DNA, 20 bp, Homo sapien
tcgagagcgtgacactcatg

SEQ ID NO: 6100372 - DNA, 20 bp, Homo sapien
atccagtctagtacgcgctg

SEQ ID NO: 6100373 - DNA, 20 bp, Homo sapien
cagcgcgtactagactggat

SEQ ID NO: 6100374 - DNA, 20 bp, Homo sapien
agagcggctgcaccagaatt

SEQ ID NO: 6100375 - DNA, 20 bp, Homo sapien
aattctggtgcagccgctct

SEQ ID NO: 6100376 - DNA, 20 bp, Homo sapien
agagcgcatgaatccgtagt

SEQ ID NO: 6100377 - DNA, 20 bp, Homo sapien
actacggattcatgcgctct

SEQ ID NO: 6100378 - DNA, 20 bp, Homo sapien
cgtcatcattactcacagtg

SEQ ID NO: 6100379 - DNA, 20 bp, Homo sapien
cactgtgagtaatgatgacg

SEQ ID NO: 6100380 - DNA, 20 bp, Homo sapien
gtcgtcgttgagctgatctc

SEQ ID NO: 6100381 - DNA, 20 bp, Homo sapien
gagatcagctcaacgacgac

SEQ ID NO: 6100382 - DNA, 20 bp, Homo sapien
gctgctatgtcattagatcg

SEQ ID NO: 6100383 - DNA, 20 bp, Homo sapien
cgatctaatgacatagcagc

SEQ ID NO: 6100384 - DNA, 20 bp, Homo sapien
gcatcctatcttacgtgtca

SEQ ID NO: 6100385 - DNA, 20 bp, Homo sapien
tgacacgtaagataggatgc

SEQ ID NO: 6100386 - DNA, 20 bp, Homo sapien
cgcatcgagtcgctgtaatt

SEQ ID NO: 6100387 - DNA, 20 bp, Homo sapien
aattacagcgactcgatgcg

SEQ ID NO: 6100388 - DNA, 20 bp, Homo sapien
catgagactgtactaagcgt

SEQ ID NO: 6100389 - DNA, 20 bp, Homo sapien
acgcttagtacagtctcatg

SEQ ID NO: 6100390 - DNA, 20 bp, Homo sapien
cacagagctgagtcggatat

SEQ ID NO: 6100391 - DNA, 20 bp, Homo sapien
atatccgactcagctctgtg

SEQ ID NO: 6100392 - DNA, 20 bp, Homo sapien
atccacatctgataaccgtg

SEQ ID NO: 6100393 - DNA, 20 bp, Homo sapien
cacggttatcagatgtggat

SEQ ID NO: 6100394 - DNA, 20 bp, Homo sapien
agagcgagtgacgcatacta

SEQ ID NO: 6100395 - DNA, 20 bp, Homo sapien
tagtatgcgtcactcgctct

SEQ ID NO: 6100396 - DNA, 20 bp, Homo sapien
agagccctgcaacgcgatat

SEQ ID NO: 6100397 - DNA, 20 bp, Homo sapien
atatcgcgttgcagggctct

SEQ ID NO: 6100398 - DNA, 20 bp, Homo sapien
tccgattcttgcgtgtgagc

SEQ ID NO: 6100399 - DNA, 20 bp, Homo sapien
gctcacacgcaagaatcgga

SEQ ID NO: 6100400 - DNA, 20 bp, Homo sapien
cgtcagcctgctctaagatg

SEQ ID NO: 6100401 - DNA, 20 bp, Homo sapien
catcttagagcaggctgacg

SEQ ID NO: 6100402 - DNA, 20 bp, Homo sapien
gtcgtatattctcagcatgg

SEQ ID NO: 6100403 - DNA, 20 bp, Homo sapien
ccatgctgagaatatacgac

SEQ ID NO: 6100404 - DNA, 20 bp, Homo sapien
gctgcgagttcctgagtatt

SEQ ID NO: 6100405 - DNA, 20 bp, Homo sapien
aatactcaggaactcgcagc

SEQ ID NO: 6100406 - DNA, 20 bp, Homo sapien
cgcatatagcttaactcacg

SEQ ID NO: 6100407 - DNA, 20 bp, Homo sapien
cgtgagttaagctatatgcg

SEQ ID NO: 6100408 - DNA, 20 bp, Homo sapien
cgcatagattacctcatcgt

SEQ ID NO: 6100409 - DNA, 20 bp, Homo sapien
acgatgaggtaatctatgcg

SEQ ID NO: 6100410 - DNA, 20 bp, Homo sapien
agagccaatgactcacctga

SEQ ID NO: 6100411 - DNA, 20 bp, Homo sapien
tcaggtgagtcattggctct

SEQ ID NO: 6100412 - DNA, 20 bp, Homo sapien
agagcatatcctactcgttg

SEQ ID NO: 6100413 - DNA, 20 bp, Homo sapien
caacgagtaggatatgctct

SEQ ID NO: 6100414 - DNA, 20 bp, Homo sapien
ttcctgtttctcgcgcagag

SEQ ID NO: 6100415 - DNA, 20 bp, Homo sapien
ctctgcgcgagaaacaggaa

SEQ ID NO: 6100416 - DNA, 20 bp, Homo sapien
gtcgcgggttctgcacatat

SEQ ID NO: 6100417 - DNA, 20 bp, Homo sapien
atatgtgcagaacccgcgac

SEQ ID NO: 6100418 - DNA, 20 bp, Homo sapien
gctgatgtgtcgagtcctat

SEQ ID NO: 6100419 - DNA, 20 bp, Homo sapien
ataggactcgacacatcagc

SEQ ID NO: 6100420 - DNA, 20 bp, Homo sapien
catctgcggatcagtctatc

SEQ ID NO: 6100421 - DNA, 20 bp, Homo sapien
gatagactgatccgcagatg

SEQ ID NO: 6100422 - DNA, 20 bp, Homo sapien
ccagcgtatctgcatagtca

SEQ ID NO: 6100423 - DNA, 20 bp, Homo sapien
tgactatgcagatacgctgg

SEQ ID NO: 6100424 - DNA, 20 bp, Homo sapien
atcatcatgcgacagtctcg

SEQ ID NO: 6100425 - DNA, 20 bp, Homo sapien
cgagactgtcgcatgatgat

SEQ ID NO: 6100426 - DNA, 20 bp, Homo sapien
atcatataggatgcggcgat

SEQ ID NO: 6100427 - DNA, 20 bp, Homo sapien
atcgccgcatcctatatgat

SEQ ID NO: 6100428 - DNA, 20 bp, Homo sapien
agagcacgtccatcgacagt

SEQ ID NO: 6100429 - DNA, 20 bp, Homo sapien
actgtcgatggacgtgctct

SEQ ID NO: 6100430 - DNA, 20 bp, Homo sapien
gtcgcatgttcgatatgtcg

SEQ ID NO: 6100431 - DNA, 20 bp, Homo sapien
cgacatatcgaacatgcgac

SEQ ID NO: 6100432 - DNA, 20 bp, Homo sapien
gcatcaacttcagtagctgt

SEQ ID NO: 6100433 - DNA, 20 bp, Homo sapien
acagctactgaagttgatgc

SEQ ID NO: 6100434 - DNA, 20 bp, Homo sapien
gcatatcgtctgtcgcgtta

SEQ ID NO: 6100435 - DNA, 20 bp, Homo sapien
taacgcgacagacgatatgc

SEQ ID NO: 6100436 - DNA, 20 bp, Homo sapien
ctgatcgcttagattactcg

SEQ ID NO: 6100437 - DNA, 20 bp, Homo sapien
cgagtaatctaagcgatcag

SEQ ID NO: 6100438 - DNA, 20 bp, Homo sapien
ctgatacattagctcggatg

SEQ ID NO: 6100439 - DNA, 20 bp, Homo sapien
catccgagctaatgtatcag

SEQ ID NO: 6100440 - DNA, 20 bp, Homo sapien
catctcagtgctacgtcatg

SEQ ID NO: 6100441 - DNA, 20 bp, Homo sapien
catgacgtagcactgagatg

SEQ ID NO: 6100442 - DNA, 20 bp, Homo sapien
agagactgcacggtcgctat

SEQ ID NO: 6100443 - DNA, 20 bp, Homo sapien
atagcgaccgtgcagtctct

SEQ ID NO: 6100444 - DNA, 20 bp, Homo sapien
atgaggactgctgaatccgt

SEQ ID NO: 6100445 - DNA, 20 bp, Homo sapien
acggattcagcagtcctcat

SEQ ID NO: 6100446 - DNA, 20 bp, Homo sapien
gtcgaatatctctgtgtgag

SEQ ID NO: 6100447 - DNA, 20 bp, Homo sapien
ctcacacagagatattcgac

SEQ ID NO: 6100448 - DNA, 20 bp, Homo sapien
gtcgaagttctcatgtatgc

SEQ ID NO: 6100449 - DNA, 20 bp, Homo sapien
gcatacatgagaacttcgac

SEQ ID NO: 6100450 - DNA, 20 bp, Homo sapien
gctgacgattcctcgcatgt

SEQ ID NO: 6100451 - DNA, 20 bp, Homo sapien
acatgcgaggaatcgtcagc

SEQ ID NO: 6100452 - DNA, 20 bp, Homo sapien
ctgagcctggtatagatgcc

SEQ ID NO: 6100453 - DNA, 20 bp, Homo sapien
ggcatctataccaggctcag

SEQ ID NO: 6100454 - DNA, 20 bp, Homo sapien
ctgagcactggtgagacatc

SEQ ID NO: 6100455 - DNA, 20 bp, Homo sapien
gatgtctcaccagtgctcag

SEQ ID NO: 6100456 - DNA, 20 bp, Homo sapien
cgcactgtcgagcgtgatat

SEQ ID NO: 6100457 - DNA, 20 bp, Homo sapien
atatcacgctcgacagtgcg

SEQ ID NO: 6100458 - DNA, 20 bp, Homo sapien
catctagctcgtcggtcaga

SEQ ID NO: 6100459 - DNA, 20 bp, Homo sapien
tctgaccgacgagctagatg

SEQ ID NO: 6100460 - DNA, 20 bp, Homo sapien
agactcgtgagagagcatcc

SEQ ID NO: 6100461 - DNA, 20 bp, Homo sapien
ggatgctctctcacgagtct

SEQ ID NO: 6100462 - DNA, 20 bp, Homo sapien
tccatctattgcgatctagg

SEQ ID NO: 6100463 - DNA, 20 bp, Homo sapien
cctagatcgcaatagatgga

SEQ ID NO: 6100464 - DNA, 20 bp, Homo sapien
tagatgaattgcgcgatgtc

SEQ ID NO: 6100465 - DNA, 20 bp, Homo sapien
gacatcgcgcaattcatcta

SEQ ID NO: 6100466 - DNA, 20 bp, Homo sapien
aatatcggcatccgtccatg

SEQ ID NO: 6100467 - DNA, 20 bp, Homo sapien
catggacggatgccgatatt

SEQ ID NO: 6100468 - DNA, 20 bp, Homo sapien
tagatcgcttgccttgatag

SEQ ID NO: 6100469 - DNA, 20 bp, Homo sapien
ctatcaaggcaagcgatcta

SEQ ID NO: 6100470 - DNA, 20 bp, Homo sapien
tagatcagttggactcgatg

SEQ ID NO: 6100471 - DNA, 20 bp, Homo sapien
catcgagtccaactgatcta

SEQ ID NO: 6100472 - DNA, 20 bp, Homo sapien
gtcctgacttctagctcatg

SEQ ID NO: 6100473 - DNA, 20 bp, Homo sapien
catgagctagaagtcaggac

SEQ ID NO: 6100474 - DNA, 20 bp, Homo sapien
gtcctcgcttcgtctatgag

SEQ ID NO: 6100475 - DNA, 20 bp, Homo sapien
ctcatagacgaagcgaggac

SEQ ID NO: 6100476 - DNA, 20 bp, Homo sapien
gcatagccttcactcatagt

SEQ ID NO: 6100477 - DNA, 20 bp, Homo sapien
actatgagtgaaggctatgc

SEQ ID NO: 6100478 - DNA, 20 bp, Homo sapien
gcatacgatggtggctaata

SEQ ID NO: 6100479 - DNA, 20 bp, Homo sapien
tattagccaccatcgtatgc

SEQ ID NO: 6100480 - DNA, 20 bp, Homo sapien
cgcacgtatgctgacggtat

SEQ ID NO: 6100481 - DNA, 20 bp, Homo sapien
ataccgtcagcatacgtgcg

SEQ ID NO: 6100482 - DNA, 20 bp, Homo sapien
catcggcgtggactgacata

SEQ ID NO: 6100483 - DNA, 20 bp, Homo sapien
tatgtcagtccacgccgatg

SEQ ID NO: 6100484 - DNA, 20 bp, Homo sapien
catcggatctgcgtcagcat

SEQ ID NO: 6100485 - DNA, 20 bp, Homo sapien
atgctgacgcagatccgatg

SEQ ID NO: 6100486 - DNA, 20 bp, Homo sapien
atcagccatcgtactcagat

SEQ ID NO: 6100487 - DNA, 20 bp, Homo sapien
atctgagtacgatggctgat

SEQ ID NO: 6100488 - DNA, 20 bp, Homo sapien
tctaaacgtgtctattgcgc

SEQ ID NO: 6100489 - DNA, 20 bp, Homo sapien
gcgcaatagacacgtttaga

SEQ ID NO: 6100490 - DNA, 20 bp, Homo sapien
tgcaggagtttcacgtctgt

SEQ ID NO: 6100491 - DNA, 20 bp, Homo sapien
acagacgtgaaactcctgca

SEQ ID NO: 6100492 - DNA, 20 bp, Homo sapien
tccatacttggtagcgtgtg

SEQ ID NO: 6100493 - DNA, 20 bp, Homo sapien
cacacgctaccaagtatgga

SEQ ID NO: 6100494 - DNA, 20 bp, Homo sapien
tagagtgatgttctcggatc

SEQ ID NO: 6100495 - DNA, 20 bp, Homo sapien
gatccgagaacatcactcta

SEQ ID NO: 6100496 - DNA, 20 bp, Homo sapien
gtccgtcgttctacatgctg

SEQ ID NO: 6100497 - DNA, 20 bp, Homo sapien
cagcatgtagaacgacggac

SEQ ID NO: 6100498 - DNA, 20 bp, Homo sapien
gtccgtcatgtgttagatgc

SEQ ID NO: 6100499 - DNA, 20 bp, Homo sapien
gcatctaacacatgacggac

SEQ ID NO: 6100500 - DNA, 20 bp, Homo sapien
ctgacatctctctgctaggt

SEQ ID NO: 6100501 - DNA, 20 bp, Homo sapien
acctagcagagagatgtcag

SEQ ID NO: 6100502 - DNA, 20 bp, Homo sapien
cgcaagtgtctcaggtgcta

SEQ ID NO: 6100503 - DNA, 20 bp, Homo sapien
tagcacctgagacacttgcg

SEQ ID NO: 6100504 - DNA, 20 bp, Homo sapien
catcgctgtaactcaatcgt

SEQ ID NO: 6100505 - DNA, 20 bp, Homo sapien
acgattgagttacagcgatg

SEQ ID NO: 6100506 - DNA, 20 bp, Homo sapien
catcgcggtggactgcaata

SEQ ID NO: 6100507 - DNA, 20 bp, Homo sapien
tattgcagtccaccgcgatg

SEQ ID NO: 6100508 - DNA, 20 bp, Homo sapien
cacaacatgctacacgaggt

SEQ ID NO: 6100509 - DNA, 20 bp, Homo sapien
acctcgtgtagcatgttgtg

SEQ ID NO: 6100510 - DNA, 20 bp, Homo sapien
tcgtgttcttgatgcgcgac

SEQ ID NO: 6100511 - DNA, 20 bp, Homo sapien
gtcgcgcatcaagaacacga

SEQ ID NO: 6100512 - DNA, 20 bp, Homo sapien
atcagcatctccgcgatagt

SEQ ID NO: 6100513 - DNA, 20 bp, Homo sapien
actatcgcggagatgctgat

SEQ ID NO: 6100514 - DNA, 20 bp, Homo sapien
atcagcactctatcgctaag

SEQ ID NO: 6100515 - DNA, 20 bp, Homo sapien
cttagcgatagagtgctgat

SEQ ID NO: 6100516 - DNA, 20 bp, Homo sapien
atcagatcgactcggtagct

SEQ ID NO: 6100517 - DNA, 20 bp, Homo sapien
agctaccgagtcgatctgat

SEQ ID NO: 6100518 - DNA, 20 bp, Homo sapien
agacaggtgcagcgccaata

SEQ ID NO: 6100519 - DNA, 20 bp, Homo sapien
tattggcgctgcacctgtct

SEQ ID NO: 6100520 - DNA, 20 bp, Homo sapien
agacactctgcacgcaatga

SEQ ID NO: 6100521 - DNA, 20 bp, Homo sapien
tcattgcgtgcagagtgtct

SEQ ID NO: 6100522 - DNA, 20 bp, Homo sapien
tagagctgtgttcgattagc

SEQ ID NO: 6100523 - DNA, 20 bp, Homo sapien
gctaatcgaacacagctcta

SEQ ID NO: 6100524 - DNA, 20 bp, Homo sapien
gctctacgttcatatcatgg

SEQ ID NO: 6100525 - DNA, 20 bp, Homo sapien
ccatgatatgaacgtagagc

SEQ ID NO: 6100526 - DNA, 20 bp, Homo sapien
ctgaatatgcagtacgctgg

SEQ ID NO: 6100527 - DNA, 20 bp, Homo sapien
ccagcgtactgcatattcag

SEQ ID NO: 6100528 - DNA, 20 bp, Homo sapien
ctgaagcgttagccgtgcat

SEQ ID NO: 6100529 - DNA, 20 bp, Homo sapien
atgcacggctaacgcttcag

SEQ ID NO: 6100530 - DNA, 20 bp, Homo sapien
cacaaatatgcaactcgtgc

SEQ ID NO: 6100531 - DNA, 20 bp, Homo sapien
gcacgagttgcatatttgtg

SEQ ID NO: 6100532 - DNA, 20 bp, Homo sapien
gtggtcttgcatccgtgtca

SEQ ID NO: 6100533 - DNA, 20 bp, Homo sapien
tgacacggatgcaagaccac

SEQ ID NO: 6100534 - DNA, 20 bp, Homo sapien
caattaagtagatcgcgctg

SEQ ID NO: 6100535 - DNA, 20 bp, Homo sapien
cagcgcgatctacttaattg

SEQ ID NO: 6100536 - DNA, 20 bp, Homo sapien
agacaactctcgactcagat

SEQ ID NO: 6100537 - DNA, 20 bp, Homo sapien
atctgagtcgagagttgtct

SEQ ID NO: 6100538 - DNA, 20 bp, Homo sapien
tgcacttgttaaggtgtgac

SEQ ID NO: 6100539 - DNA, 20 bp, Homo sapien
gtcacaccttaacaagtgca

SEQ ID NO: 6100540 - DNA, 20 bp, Homo sapien
tccacttattgcgtatgcgg

SEQ ID NO: 6100541 - DNA, 20 bp, Homo sapien
ccgcatacgcaataagtgga

SEQ ID NO: 6100542 - DNA, 20 bp, Homo sapien
tagactgattgctactacgg

SEQ ID NO: 6100543 - DNA, 20 bp, Homo sapien
ccgtagtagcaatcagtcta

SEQ ID NO: 6100544 - DNA, 20 bp, Homo sapien
tagactcgtgttgatcctgc

SEQ ID NO: 6100545 - DNA, 20 bp, Homo sapien
gcaggatcaacacgagtcta

SEQ ID NO: 6100546 - DNA, 20 bp, Homo sapien
gtcatgcgttcgtctatcgg

SEQ ID NO: 6100547 - DNA, 20 bp, Homo sapien
ccgatagacgaacgcatgac

SEQ ID NO: 6100548 - DNA, 20 bp, Homo sapien
gctctaatgttaagtgctcg

SEQ ID NO: 6100549 - DNA, 20 bp, Homo sapien
cgagcacttaacattagagc

SEQ ID NO: 6100550 - DNA, 20 bp, Homo sapien
gctcgttatgtatgtagacg

SEQ ID NO: 6100551 - DNA, 20 bp, Homo sapien
cgtctacatacataacgagc

SEQ ID NO: 6100552 - DNA, 20 bp, Homo sapien
gctcgtagttcatagtatcg

SEQ ID NO: 6100553 - DNA, 20 bp, Homo sapien
cgatactatgaactacgagc

SEQ ID NO: 6100554 - DNA, 20 bp, Homo sapien
gtggtcacttctctatggcg

SEQ ID NO: 6100555 - DNA, 20 bp, Homo sapien
cgccatagagaagtgaccac

SEQ ID NO: 6100556 - DNA, 20 bp, Homo sapien
ttcaccgggtttattgacgg

SEQ ID NO: 6100557 - DNA, 20 bp, Homo sapien
ccgtcaataaacccggtgaa

SEQ ID NO: 6100558 - DNA, 20 bp, Homo sapien
gcagtgtctcctgtcgtatg

SEQ ID NO: 6100559 - DNA, 20 bp, Homo sapien
catacgacaggagacactgc

SEQ ID NO: 6100560 - DNA, 20 bp, Homo sapien
ctgaacgtgcatgtcggctt

SEQ ID NO: 6100561 - DNA, 20 bp, Homo sapien
aagccgacatgcacgttcag

SEQ ID NO: 6100562 - DNA, 20 bp, Homo sapien
ctctgtcagctcgctagtta

SEQ ID NO: 6100563 - DNA, 20 bp, Homo sapien
taactagcgagctgacagag

SEQ ID NO: 6100564 - DNA, 20 bp, Homo sapien
cgatgtcctcacctataatg

SEQ ID NO: 6100565 - DNA, 20 bp, Homo sapien
cattataggtgaggacatcg

SEQ ID NO: 6100566 - DNA, 20 bp, Homo sapien
catcgaactgctacgactga

SEQ ID NO: 6100567 - DNA, 20 bp, Homo sapien
tcagtcgtagcagttcgatg

SEQ ID NO: 6100568 - DNA, 20 bp, Homo sapien
agaatactctacatcgagcg

SEQ ID NO: 6100569 - DNA, 20 bp, Homo sapien
cgctcgatgtagagtattct

SEQ ID NO: 6100570 - DNA, 20 bp, Homo sapien
tagacgactgtgtgtgattc

SEQ ID NO: 6100571 - DNA, 20 bp, Homo sapien
gaatcacacacagtcgtcta

SEQ ID NO: 6100572 - DNA, 20 bp, Homo sapien
gctcgctattagttcagctc

SEQ ID NO: 6100573 - DNA, 20 bp, Homo sapien
gagctgaactaatagcgagc

SEQ ID NO: 6100574 - DNA, 20 bp, Homo sapien
gctcgccattcctagagtgt

SEQ ID NO: 6100575 - DNA, 20 bp, Homo sapien
acactctaggaatggcgagc

SEQ ID NO: 6100576 - DNA, 20 bp, Homo sapien
gcagtcttccgagcgtgtat

SEQ ID NO: 6100577 - DNA, 20 bp, Homo sapien
atacacgctcggaagactgc

SEQ ID NO: 6100578 - DNA, 20 bp, Homo sapien
gtggctgttgagcatctctc

SEQ ID NO: 6100579 - DNA, 20 bp, Homo sapien
gagagatgctcaacagccac

SEQ ID NO: 6100580 - DNA, 20 bp, Homo sapien
gcagtctctgtgaccttatc

SEQ ID NO: 6100581 - DNA, 20 bp, Homo sapien
gataaggtcacagagactgc

SEQ ID NO: 6100582 - DNA, 20 bp, Homo sapien
gcagtctattccactcaatg

SEQ ID NO: 6100583 - DNA, 20 bp, Homo sapien
cattgagtggaatagactgc

SEQ ID NO: 6100584 - DNA, 20 bp, Homo sapien
ctctgtactagatggtcatg

SEQ ID NO: 6100585 - DNA, 20 bp, Homo sapien
catgaccatctagtacagag

SEQ ID NO: 6100586 - DNA, 20 bp, Homo sapien
cgatgctatctactcggtgc

SEQ ID NO: 6100587 - DNA, 20 bp, Homo sapien
gcaccgagtagatagcatcg

SEQ ID NO: 6100588 - DNA, 20 bp, Homo sapien
cgatgcaatggtacacgtct

SEQ ID NO: 6100589 - DNA, 20 bp, Homo sapien
agacgtgtaccattgcatcg

SEQ ID NO: 6100590 - DNA, 20 bp, Homo sapien
catccgatctgccaggtgat

SEQ ID NO: 6100591 - DNA, 20 bp, Homo sapien
atcacctggcagatcggatg

SEQ ID NO: 6100592 - DNA, 20 bp, Homo sapien
catccagctcgacgtatgag

SEQ ID NO: 6100593 - DNA, 20 bp, Homo sapien
ctcatacgtcgagctggatg

SEQ ID NO: 6100594 - DNA, 20 bp, Homo sapien
atcaatagtctcactgacgc

SEQ ID NO: 6100595 - DNA, 20 bp, Homo sapien
gcgtcagtgagactattgat

SEQ ID NO: 6100596 - DNA, 20 bp, Homo sapien
atcaagctcctcatcagtag

SEQ ID NO: 6100597 - DNA, 20 bp, Homo sapien
ctactgatgaggagcttgat

SEQ ID NO: 6100598 - DNA, 20 bp, Homo sapien
agaagctatactatcgcagc

SEQ ID NO: 6100599 - DNA, 20 bp, Homo sapien
gctgcgatagtatagcttct

SEQ ID NO: 6100600 - DNA, 20 bp, Homo sapien
gacttaggttacatgcactg

SEQ ID NO: 6100601 - DNA, 20 bp, Homo sapien
cagtgcatgtaacctaagtc

SEQ ID NO: 6100602 - DNA, 20 bp, Homo sapien
ttatcatatttcagcgcggg

SEQ ID NO: 6100603 - DNA, 20 bp, Homo sapien
cccgcgctgaaatatgataa

SEQ ID NO: 6100604 - DNA, 20 bp, Homo sapien
tagacacgttggtatcatgg

SEQ ID NO: 6100605 - DNA, 20 bp, Homo sapien
ccatgataccaacgtgtcta

SEQ ID NO: 6100606 - DNA, 20 bp, Homo sapien
gcagtcagttcataccgtgt

SEQ ID NO: 6100607 - DNA, 20 bp, Homo sapien
acacggtatgaactgactgc

SEQ ID NO: 6100608 - DNA, 20 bp, Homo sapien
cgatctactgctagtccatg

SEQ ID NO: 6100609 - DNA, 20 bp, Homo sapien
catggactagcagtagatcg

SEQ ID NO: 6100610 - DNA, 20 bp, Homo sapien
cgatcctatatcctgtgact

SEQ ID NO: 6100611 - DNA, 20 bp, Homo sapien
agtcacaggatataggatcg

SEQ ID NO: 6100612 - DNA, 20 bp, Homo sapien
cgatccactgtcatacgata

SEQ ID NO: 6100613 - DNA, 20 bp, Homo sapien
tatcgtatgacagtggatcg

SEQ ID NO: 6100614 - DNA, 20 bp, Homo sapien
catcatgtgcctcactagga

SEQ ID NO: 6100615 - DNA, 20 bp, Homo sapien
tcctagtgaggcacatgatg

SEQ ID NO: 6100616 - DNA, 20 bp, Homo sapien
catcatgctcgactctgaga

SEQ ID NO: 6100617 - DNA, 20 bp, Homo sapien
tctcagagtcgagcatgatg

SEQ ID NO: 6100618 - DNA, 20 bp, Homo sapien
catcatactgcatcgtcatg

SEQ ID NO: 6100619 - DNA, 20 bp, Homo sapien
catgacgatgcagtatgatg

SEQ ID NO: 6100620 - DNA, 20 bp, Homo sapien
caatctagtatcagtggcgc

SEQ ID NO: 6100621 - DNA, 20 bp, Homo sapien
gcgccactgatactagattg

SEQ ID NO: 6100622 - DNA, 20 bp, Homo sapien
cttcagcggatgtatcggat

SEQ ID NO: 6100623 - DNA, 20 bp, Homo sapien
atccgatacatccgctgaag

SEQ ID NO: 6100624 - DNA, 20 bp, Homo sapien
atcaagcgtggatgacgatc

SEQ ID NO: 6100625 - DNA, 20 bp, Homo sapien
gatcgtcatccacgcttgat

SEQ ID NO: 6100626 - DNA, 20 bp, Homo sapien
gcagtacatggtagttcagc

SEQ ID NO: 6100627 - DNA, 20 bp, Homo sapien
gctgaactaccatgtactgc

SEQ ID NO: 6100628 - DNA, 20 bp, Homo sapien
gcagtaaattcaatcgcgtg

SEQ ID NO: 6100629 - DNA, 20 bp, Homo sapien
cacgcgattgaatttactgc

SEQ ID NO: 6100630 - DNA, 20 bp, Homo sapien
cgatatgcgtggcagtacat

SEQ ID NO: 6100631 - DNA, 20 bp, Homo sapien
atgtactgccacgcatatcg

SEQ ID NO: 6100632 - DNA, 20 bp, Homo sapien
cgatagcttacacgtcatgc

SEQ ID NO: 6100633 - DNA, 20 bp, Homo sapien
gcatgacgtgtaagctatcg

SEQ ID NO: 6100634 - DNA, 20 bp, Homo sapien
tatgcacgttggtgacgatt

SEQ ID NO: 6100635 - DNA, 20 bp, Homo sapien
aatcgtcaccaacgtgcata

SEQ ID NO: 6100636 - DNA, 20 bp, Homo sapien
gcgacacgttccgagcatat

SEQ ID NO: 6100637 - DNA, 20 bp, Homo sapien
atatgctcggaacgtgtcgc

SEQ ID NO: 6100638 - DNA, 20 bp, Homo sapien
cagagcggtgcatagcctaa

SEQ ID NO: 6100639 - DNA, 20 bp, Homo sapien
ttaggctatgcaccgctctg

SEQ ID NO: 6100640 - DNA, 20 bp, Homo sapien
cagagccatgctacatcgtt

SEQ ID NO: 6100641 - DNA, 20 bp, Homo sapien
aacgatgtagcatggctctg

SEQ ID NO: 6100642 - DNA, 20 bp, Homo sapien
atgcacgatcctctacattg

SEQ ID NO: 6100643 - DNA, 20 bp, Homo sapien
caatgtagaggatcgtgcat

SEQ ID NO: 6100644 - DNA, 20 bp, Homo sapien
cagaacctgatatgctcgcg

SEQ ID NO: 6100645 - DNA, 20 bp, Homo sapien
cgcgagcatatcaggttctg

SEQ ID NO: 6100646 - DNA, 20 bp, Homo sapien
atgcaccgtgagtccgatga

SEQ ID NO: 6100647 - DNA, 20 bp, Homo sapien
tcatcggactcacggtgcat

SEQ ID NO: 6100648 - DNA, 20 bp, Homo sapien
agctacgtgactacagtgat

SEQ ID NO: 6100649 - DNA, 20 bp, Homo sapien
atcactgtagtcacgtagct

SEQ ID NO: 6100650 - DNA, 20 bp, Homo sapien
atgcacagtgatagcagctc

SEQ ID NO: 6100651 - DNA, 20 bp, Homo sapien
gagctgctatcactgtgcat

SEQ ID NO: 6100652 - DNA, 20 bp, Homo sapien
agcgtgactcgacattagct

SEQ ID NO: 6100653 - DNA, 20 bp, Homo sapien
agctaatgtcgagtcacgct

SEQ ID NO: 6100654 - DNA, 20 bp, Homo sapien
gttacatattctgagagcgg

SEQ ID NO: 6100655 - DNA, 20 bp, Homo sapien
ccgctctcagaatatgtaac

SEQ ID NO: 6100656 - DNA, 20 bp, Homo sapien
caatcatatctaaccggctg

SEQ ID NO: 6100657 - DNA, 20 bp, Homo sapien
cagccggttagatatgattg

SEQ ID NO: 6100658 - DNA, 20 bp, Homo sapien
caatcagctagtcatctcgt

SEQ ID NO: 6100659 - DNA, 20 bp, Homo sapien
acgagatgactagctgattg

SEQ ID NO: 6100660 - DNA, 20 bp, Homo sapien
actgatggcacagcgtatgc

SEQ ID NO: 6100661 - DNA, 20 bp, Homo sapien
gcatacgctgtgccatcagt

SEQ ID NO: 6100662 - DNA, 20 bp, Homo sapien
ttacgcgctttgccgctatg

SEQ ID NO: 6100663 - DNA, 20 bp, Homo sapien
catagcggcaaagcgcgtaa

SEQ ID NO: 6100664 - DNA, 20 bp, Homo sapien
tcatgttggatcttaggccg

SEQ ID NO: 6100665 - DNA, 20 bp, Homo sapien
cggcctaagatccaacatga

SEQ ID NO: 6100666 - DNA, 20 bp, Homo sapien
agcctatcgtcacgcgagat

SEQ ID NO: 6100667 - DNA, 20 bp, Homo sapien
atctcgcgtgacgataggct

SEQ ID NO: 6100668 - DNA, 20 bp, Homo sapien
tcatgtcgttgcgtctcgga

SEQ ID NO: 6100669 - DNA, 20 bp, Homo sapien
tccgagacgcaacgacatga

SEQ ID NO: 6100670 - DNA, 20 bp, Homo sapien
ctctaggcttacgcgcatga

SEQ ID NO: 6100671 - DNA, 20 bp, Homo sapien
tcatgcgcgtaagcctagag

SEQ ID NO: 6100672 - DNA, 20 bp, Homo sapien
cgagtgtctcaaactatctg

SEQ ID NO: 6100673 - DNA, 20 bp, Homo sapien
cagatagtttgagacactcg

SEQ ID NO: 6100674 - DNA, 20 bp, Homo sapien
caatagctgatgcgacatga

SEQ ID NO: 6100675 - DNA, 20 bp, Homo sapien
tcatgtcgcatcagctattg

SEQ ID NO: 6100676 - DNA, 20 bp, Homo sapien
actgaagatgcaccgctata

SEQ ID NO: 6100677 - DNA, 20 bp, Homo sapien
tatagcggtgcatcttcagt

SEQ ID NO: 6100678 - DNA, 20 bp, Homo sapien
tcatggtgttgagtctgcac

SEQ ID NO: 6100679 - DNA, 20 bp, Homo sapien
gtgcagactcaacaccatga

SEQ ID NO: 6100680 - DNA, 20 bp, Homo sapien
tacttgtatgatatggcgcg

SEQ ID NO: 6100681 - DNA, 20 bp, Homo sapien
cgcgccatatcatacaagta

SEQ ID NO: 6100682 - DNA, 20 bp, Homo sapien
gtatttatatcatgcgcccg

SEQ ID NO: 6100683 - DNA, 20 bp, Homo sapien
cgggcgcatgatataaatac

SEQ ID NO: 6100684 - DNA, 20 bp, Homo sapien
gctcagagtgtcgttagatc

SEQ ID NO: 6100685 - DNA, 20 bp, Homo sapien
gatctaacgacactctgagc

SEQ ID NO: 6100686 - DNA, 20 bp, Homo sapien
gcagctcgttatacttactg

SEQ ID NO: 6100687 - DNA, 20 bp, Homo sapien
cagtaagtataacgagctgc

SEQ ID NO: 6100688 - DNA, 20 bp, Homo sapien
agcctatatgatacgcagtc

SEQ ID NO: 6100689 - DNA, 20 bp, Homo sapien
gactgcgtatcatataggct

SEQ ID NO: 6100690 - DNA, 20 bp, Homo sapien
ctcgtattactgcatctggc

SEQ ID NO: 6100691 - DNA, 20 bp, Homo sapien
gccagatgcagtaatacgag

SEQ ID NO: 6100692 - DNA, 20 bp, Homo sapien
catatctggagagtctgcgc

SEQ ID NO: 6100693 - DNA, 20 bp, Homo sapien
gcgcagactctccagatatg

SEQ ID NO: 6100694 - DNA, 20 bp, Homo sapien
caatagatgcctagtacgct

SEQ ID NO: 6100695 - DNA, 20 bp, Homo sapien
agcgtactaggcatctattg

SEQ ID NO: 6100696 - DNA, 20 bp, Homo sapien
caatacctgtgacgagctgc

SEQ ID NO: 6100697 - DNA, 20 bp, Homo sapien
gcagctcgtcacaggtattg

SEQ ID NO: 6100698 - DNA, 20 bp, Homo sapien
atatgcctgacgcgggatct

SEQ ID NO: 6100699 - DNA, 20 bp, Homo sapien
agatcccgcgtcaggcatat

SEQ ID NO: 6100700 - DNA, 20 bp, Homo sapien
actctagtgcaagcggctca

SEQ ID NO: 6100701 - DNA, 20 bp, Homo sapien
tgagccgcttgcactagagt

SEQ ID NO: 6100702 - DNA, 20 bp, Homo sapien
gtattatgtgtatgcgacgc

SEQ ID NO: 6100703 - DNA, 20 bp, Homo sapien
gcgtcgcatacacataatac

SEQ ID NO: 6100704 - DNA, 20 bp, Homo sapien
gctcacagtgtatggtgtat

SEQ ID NO: 6100705 - DNA, 20 bp, Homo sapien
atacaccatacactgtgagc

SEQ ID NO: 6100706 - DNA, 20 bp, Homo sapien
catatccttaacacgcagtg

SEQ ID NO: 6100707 - DNA, 20 bp, Homo sapien
cactgcgtgttaaggatatg

SEQ ID NO: 6100708 - DNA, 20 bp, Homo sapien
catatcatgcactatccgag

SEQ ID NO: 6100709 - DNA, 20 bp, Homo sapien
ctcggatagtgcatgatatg

SEQ ID NO: 6100710 - DNA, 20 bp, Homo sapien
aataggccgatctcacgcag

SEQ ID NO: 6100711 - DNA, 20 bp, Homo sapien
ctgcgtgagatcggcctatt

SEQ ID NO: 6100712 - DNA, 20 bp, Homo sapien
atatgactggaatagccgtg

SEQ ID NO: 6100713 - DNA, 20 bp, Homo sapien
cacggctattccagtcatat

SEQ ID NO: 6100714 - DNA, 20 bp, Homo sapien
atatctgatccactagctcg

SEQ ID NO: 6100715 - DNA, 20 bp, Homo sapien
cgagctagtggatcagatat

SEQ ID NO: 6100716 - DNA, 20 bp, Homo sapien
tgatctattgtctacgcggc

SEQ ID NO: 6100717 - DNA, 20 bp, Homo sapien
gccgcgtagacaatagatca

SEQ ID NO: 6100718 - DNA, 20 bp, Homo sapien
gtatgtgctgttatcgaagc

SEQ ID NO: 6100719 - DNA, 20 bp, Homo sapien
gcttcgataacagcacatac

SEQ ID NO: 6100720 - DNA, 20 bp, Homo sapien
gctattatgatgtctgaggc

SEQ ID NO: 6100721 - DNA, 20 bp, Homo sapien
gcctcagacatcataatagc

SEQ ID NO: 6100722 - DNA, 20 bp, Homo sapien
ctcgctagtgtgcaggctaa

SEQ ID NO: 6100723 - DNA, 20 bp, Homo sapien
ttagcctgcacactagcgag

SEQ ID NO: 6100724 - DNA, 20 bp, Homo sapien
cgagcgagtgtagcaccata

SEQ ID NO: 6100725 - DNA, 20 bp, Homo sapien
tatggtgctacactcgctcg

SEQ ID NO: 6100726 - DNA, 20 bp, Homo sapien
cgagccgatggtcagcaata

SEQ ID NO: 6100727 - DNA, 20 bp, Homo sapien
tattgctgaccatcggctcg

SEQ ID NO: 6100728 - DNA, 20 bp, Homo sapien
catatagctctagtatccgc

SEQ ID NO: 6100729 - DNA, 20 bp, Homo sapien
gcggatactagagctatatg

SEQ ID NO: 6100730 - DNA, 20 bp, Homo sapien
catatactggatcacggtgc

SEQ ID NO: 6100731 - DNA, 20 bp, Homo sapien
gcaccgtgatccagtatatg

SEQ ID NO: 6100732 - DNA, 20 bp, Homo sapien
aatagacatcagtagctccg

SEQ ID NO: 6100733 - DNA, 20 bp, Homo sapien
cggagctactgatgtctatt

SEQ ID NO: 6100734 - DNA, 20 bp, Homo sapien
catatacgtctgatgacctc

SEQ ID NO: 6100735 - DNA, 20 bp, Homo sapien
gaggtcatcagacgtatatg

SEQ ID NO: 6100736 - DNA, 20 bp, Homo sapien
caagtagtgctcacgcatct

SEQ ID NO: 6100737 - DNA, 20 bp, Homo sapien
agatgcgtgagcactacttg

SEQ ID NO: 6100738 - DNA, 20 bp, Homo sapien
atatcgaggatcgtccgcat

SEQ ID NO: 6100739 - DNA, 20 bp, Homo sapien
atgcggacgatcctcgatat

SEQ ID NO: 6100740 - DNA, 20 bp, Homo sapien
actcgatatgagcagcagtc

SEQ ID NO: 6100741 - DNA, 20 bp, Homo sapien
gactgctgctcatatcgagt

SEQ ID NO: 6100742 - DNA, 20 bp, Homo sapien
actcatcgtagccactgaag

SEQ ID NO: 6100743 - DNA, 20 bp, Homo sapien
cttcagtggctacgatgagt

SEQ ID NO: 6100744 - DNA, 20 bp, Homo sapien
tactcacattgcggagctgt

SEQ ID NO: 6100745 - DNA, 20 bp, Homo sapien
acagctccgcaatgtgagta

SEQ ID NO: 6100746 - DNA, 20 bp, Homo sapien
gtatcatcttctaagctcgg

SEQ ID NO: 6100747 - DNA, 20 bp, Homo sapien
ccgagcttagaagatgatac

SEQ ID NO: 6100748 - DNA, 20 bp, Homo sapien
gtatcacgttcgtcgctgtg

SEQ ID NO: 6100749 - DNA, 20 bp, Homo sapien
cacagcgacgaacgtgatac

SEQ ID NO: 6100750 - DNA, 20 bp, Homo sapien
gctatgccttccgcgtgatt

SEQ ID NO: 6100751 - DNA, 20 bp, Homo sapien
aatcacgcggaaggcatagc

SEQ ID NO: 6100752 - DNA, 20 bp, Homo sapien
ctcgcggcttagatcagctt

SEQ ID NO: 6100753 - DNA, 20 bp, Homo sapien
aagctgatctaagccgcgag

SEQ ID NO: 6100754 - DNA, 20 bp, Homo sapien
tatccatattgcgtcatgcg

SEQ ID NO: 6100755 - DNA, 20 bp, Homo sapien
cgcatgacgcaatatggata

SEQ ID NO: 6100756 - DNA, 20 bp, Homo sapien
cgagcaggtgtcacgcaata

SEQ ID NO: 6100757 - DNA, 20 bp, Homo sapien
tattgcgtgacacctgctcg

SEQ ID NO: 6100758 - DNA, 20 bp, Homo sapien
catagtgatcctgctccata

SEQ ID NO: 6100759 - DNA, 20 bp, Homo sapien
tatggagcaggatcactatg

SEQ ID NO: 6100760 - DNA, 20 bp, Homo sapien
atatcatagctcctcgctgg

SEQ ID NO: 6100761 - DNA, 20 bp, Homo sapien
ccagcgaggagctatgatat

SEQ ID NO: 6100762 - DNA, 20 bp, Homo sapien
actcatcatgcaatgcggac

SEQ ID NO: 6100763 - DNA, 20 bp, Homo sapien
gtccgcattgcatgatgagt

SEQ ID NO: 6100764 - DNA, 20 bp, Homo sapien
actcactatcgagcctagag

SEQ ID NO: 6100765 - DNA, 20 bp, Homo sapien
ctctaggctcgatagtgagt

SEQ ID NO: 6100766 - DNA, 20 bp, Homo sapien
actcaccgtgcaagcgatga

SEQ ID NO: 6100767 - DNA, 20 bp, Homo sapien
tcatcgcttgcacggtgagt

SEQ ID NO: 6100768 - DNA, 20 bp, Homo sapien
actcaaatgcacataccgtg

SEQ ID NO: 6100769 - DNA, 20 bp, Homo sapien
cacggtatgtgcatttgagt

SEQ ID NO: 6100770 - DNA, 20 bp, Homo sapien
tactactattgatgcacggg

SEQ ID NO: 6100771 - DNA, 20 bp, Homo sapien
cccgtgcatcaatagtagta

SEQ ID NO: 6100772 - DNA, 20 bp, Homo sapien
gtagcgccttcggtgcatat

SEQ ID NO: 6100773 - DNA, 20 bp, Homo sapien
atatgcaccgaaggcgctac

SEQ ID NO: 6100774 - DNA, 20 bp, Homo sapien
gtagcctatgtgcgtatgtc

SEQ ID NO: 6100775 - DNA, 20 bp, Homo sapien
gacatacgcacataggctac

SEQ ID NO: 6100776 - DNA, 20 bp, Homo sapien
cactgtcaccgtctatattg

SEQ ID NO: 6100777 - DNA, 20 bp, Homo sapien
caatatagacggtgacagtg

SEQ ID NO: 6100778 - DNA, 20 bp, Homo sapien
tggtcaggtttcgtatcagc

SEQ ID NO: 6100779 - DNA, 20 bp, Homo sapien
gctgatacgaaacctgacca

SEQ ID NO: 6100780 - DNA, 20 bp, Homo sapien
gctatcgcttcctcaggtgt

SEQ ID NO: 6100781 - DNA, 20 bp, Homo sapien
acacctgaggaagcgatagc

SEQ ID NO: 6100782 - DNA, 20 bp, Homo sapien
gctatccattccgctgagtt

SEQ ID NO: 6100783 - DNA, 20 bp, Homo sapien
aactcagcggaatggatagc

SEQ ID NO: 6100784 - DNA, 20 bp, Homo sapien
gctatacttcgagtcacttg

SEQ ID NO: 6100785 - DNA, 20 bp, Homo sapien
caagtgactcgaagtatagc

SEQ ID NO: 6100786 - DNA, 20 bp, Homo sapien
ctcgcatatcctctaggttg

SEQ ID NO: 6100787 - DNA, 20 bp, Homo sapien
caacctagaggatatgcgag

SEQ ID NO: 6100788 - DNA, 20 bp, Homo sapien
ctcgcacctgctatatgtga

SEQ ID NO: 6100789 - DNA, 20 bp, Homo sapien
tcacatatagcaggtgcgag

SEQ ID NO: 6100790 - DNA, 20 bp, Homo sapien
ctcgcacattaggctagatt

SEQ ID NO: 6100791 - DNA, 20 bp, Homo sapien
aatctagcctaatgtgcgag

SEQ ID NO: 6100792 - DNA, 20 bp, Homo sapien
ctcgaccgttagcagcatga

SEQ ID NO: 6100793 - DNA, 20 bp, Homo sapien
tcatgctgctaacggtcgag

SEQ ID NO: 6100794 - DNA, 20 bp, Homo sapien
caagcatctctactagcagt

SEQ ID NO: 6100795 - DNA, 20 bp, Homo sapien
actgctagtagagatgcttg

SEQ ID NO: 6100796 - DNA, 20 bp, Homo sapien
atatcaatgcagagcgtgcg

SEQ ID NO: 6100797 - DNA, 20 bp, Homo sapien
cgcacgctctgcattgatat

SEQ ID NO: 6100798 - DNA, 20 bp, Homo sapien
actatgactcaatcgctcga

SEQ ID NO: 6100799 - DNA, 20 bp, Homo sapien
tcgagcgattgagtcatagt

SEQ ID NO: 6100800 - DNA, 20 bp, Homo sapien
agccgaactgcacgagcata

SEQ ID NO: 6100801 - DNA, 20 bp, Homo sapien
tatgctcgtgcagttcggct

SEQ ID NO: 6100802 - DNA, 20 bp, Homo sapien
tgatactattgtcgtcgggc

SEQ ID NO: 6100803 - DNA, 20 bp, Homo sapien
gcccgacgacaatagtatca

SEQ ID NO: 6100804 - DNA, 20 bp, Homo sapien
tcatatcgttggagttgagc

SEQ ID NO: 6100805 - DNA, 20 bp, Homo sapien
gctcaactccaacgatatga

SEQ ID NO: 6100806 - DNA, 20 bp, Homo sapien
gctagatcgtgcgttatatg

SEQ ID NO: 6100807 - DNA, 20 bp, Homo sapien
catataacgcacgatctagc

SEQ ID NO: 6100808 - DNA, 20 bp, Homo sapien
atagtagctcctgagtcacg

SEQ ID NO: 6100809 - DNA, 20 bp, Homo sapien
cgtgactcaggagctactat

SEQ ID NO: 6100810 - DNA, 20 bp, Homo sapien
atagtacatctgagcctccg

SEQ ID NO: 6100811 - DNA, 20 bp, Homo sapien
cggaggctcagatgtactat

SEQ ID NO: 6100812 - DNA, 20 bp, Homo sapien
actacgggtgcagcagcata

SEQ ID NO: 6100813 - DNA, 20 bp, Homo sapien
tatgctgctgcacccgtagt

SEQ ID NO: 6100814 - DNA, 20 bp, Homo sapien
tgtgcgactttctcatgcgg

SEQ ID NO: 6100815 - DNA, 20 bp, Homo sapien
ccgcatgagaaagtcgcaca

SEQ ID NO: 6100816 - DNA, 20 bp, Homo sapien
tgagtgcgtttacttgccgc

SEQ ID NO: 6100817 - DNA, 20 bp, Homo sapien
gcggcaagtaaacgcactca

SEQ ID NO: 6100818 - DNA, 20 bp, Homo sapien
tacgcttattgatactgcgg

SEQ ID NO: 6100819 - DNA, 20 bp, Homo sapien
ccgcagtatcaataagcgta

SEQ ID NO: 6100820 - DNA, 20 bp, Homo sapien
tacgctgcttgcgcctatat

SEQ ID NO: 6100821 - DNA, 20 bp, Homo sapien
atataggcgcaagcagcgta

SEQ ID NO: 6100822 - DNA, 20 bp, Homo sapien
agcccagatcctacgagatg

SEQ ID NO: 6100823 - DNA, 20 bp, Homo sapien
catctcgtaggatctgggct

SEQ ID NO: 6100824 - DNA, 20 bp, Homo sapien
gtactgtgtcttagctggca

SEQ ID NO: 6100825 - DNA, 20 bp, Homo sapien
tgccagctaagacacagtac

SEQ ID NO: 6100826 - DNA, 20 bp, Homo sapien
gtactagattctcacatcgg

SEQ ID NO: 6100827 - DNA, 20 bp, Homo sapien
ccgatgtgagaatctagtac

SEQ ID NO: 6100828 - DNA, 20 bp, Homo sapien
gtactacattcgtgcgatgg

SEQ ID NO: 6100829 - DNA, 20 bp, Homo sapien
ccatcgcacgaatgtagtac

SEQ ID NO: 6100830 - DNA, 20 bp, Homo sapien
gctactgttaatccatgtgc

SEQ ID NO: 6100831 - DNA, 20 bp, Homo sapien
gcacatggattaacagtagc

SEQ ID NO: 6100832 - DNA, 20 bp, Homo sapien
gcagactatgtcgggtcaca

SEQ ID NO: 6100833 - DNA, 20 bp, Homo sapien
tgtgacccgacatagtctgc

SEQ ID NO: 6100834 - DNA, 20 bp, Homo sapien
gcagacgcttgaaacgatgc

SEQ ID NO: 6100835 - DNA, 20 bp, Homo sapien
gcatcgtttcaagcgtctgc

SEQ ID NO: 6100836 - DNA, 20 bp, Homo sapien
gcagacacttccagtcgatt

SEQ ID NO: 6100837 - DNA, 20 bp, Homo sapien
aatcgactggaagtgtctgc

SEQ ID NO: 6100838 - DNA, 20 bp, Homo sapien
ctcctctattaccagtgatg

SEQ ID NO: 6100839 - DNA, 20 bp, Homo sapien
catcactggtaatagaggag

SEQ ID NO: 6100840 - DNA, 20 bp, Homo sapien
ctcctagcttatgacagcat

SEQ ID NO: 6100841 - DNA, 20 bp, Homo sapien
atgctgtcataagctaggag

SEQ ID NO: 6100842 - DNA, 20 bp, Homo sapien
cgactgcgtctcaggtcaat

SEQ ID NO: 6100843 - DNA, 20 bp, Homo sapien
attgacctgagacgcagtcg

SEQ ID NO: 6100844 - DNA, 20 bp, Homo sapien
aagtgcgccagcgtcataga

SEQ ID NO: 6100845 - DNA, 20 bp, Homo sapien
tctatgacgctggcgcactt

SEQ ID NO: 6100846 - DNA, 20 bp, Homo sapien
cgactatgtcaagctatctg

SEQ ID NO: 6100847 - DNA, 20 bp, Homo sapien
cagatagcttgacatagtcg

SEQ ID NO: 6100848 - DNA, 20 bp, Homo sapien
caagagtctatcatacgtcg

SEQ ID NO: 6100849 - DNA, 20 bp, Homo sapien
cgacgtatgatagactcttg

SEQ ID NO: 6100850 - DNA, 20 bp, Homo sapien
ataggcagtgaggcatctcc

SEQ ID NO: 6100851 - DNA, 20 bp, Homo sapien
ggagatgcctcactgcctat

SEQ ID NO: 6100852 - DNA, 20 bp, Homo sapien
tgtgataatttcgacgaggc

SEQ ID NO: 6100853 - DNA, 20 bp, Homo sapien
gcctcgtcgaaattatcaca

SEQ ID NO: 6100854 - DNA, 20 bp, Homo sapien
tacgccaattcgccattatg

SEQ ID NO: 6100855 - DNA, 20 bp, Homo sapien
cataatggcgaattggcgta

SEQ ID NO: 6100856 - DNA, 20 bp, Homo sapien
tacgatgcttgatggttagc

SEQ ID NO: 6100857 - DNA, 20 bp, Homo sapien
gctaaccatcaagcatcgta

SEQ ID NO: 6100858 - DNA, 20 bp, Homo sapien
gctactattatctcatcggc

SEQ ID NO: 6100859 - DNA, 20 bp, Homo sapien
gccgatgagataatagtagc

SEQ ID NO: 6100860 - DNA, 20 bp, Homo sapien
gcagaagctcgttcacgtca

SEQ ID NO: 6100861 - DNA, 20 bp, Homo sapien
tgacgtgaacgagcttctgc

SEQ ID NO: 6100862 - DNA, 20 bp, Homo sapien
gcagaagattcgcacgactt

SEQ ID NO: 6100863 - DNA, 20 bp, Homo sapien
aagtcgtgcgaatcttctgc

SEQ ID NO: 6100864 - DNA, 20 bp, Homo sapien
cgactaatgctagatcatcg

SEQ ID NO: 6100865 - DNA, 20 bp, Homo sapien
cgatgatctagcattagtcg

SEQ ID NO: 6100866 - DNA, 20 bp, Homo sapien
tcgtccactttagcatgatg

SEQ ID NO: 6100867 - DNA, 20 bp, Homo sapien
catcatgctaaagtggacga

SEQ ID NO: 6100868 - DNA, 20 bp, Homo sapien
atagctgatagggactctgc

SEQ ID NO: 6100869 - DNA, 20 bp, Homo sapien
gcagagtccctatcagctat

SEQ ID NO: 6100870 - DNA, 20 bp, Homo sapien
atagcgtatctagtcactcg

SEQ ID NO: 6100871 - DNA, 20 bp, Homo sapien
cgagtgactagatacgctat

SEQ ID NO: 6100872 - DNA, 20 bp, Homo sapien
acgtcatagcgtcgccagat

SEQ ID NO: 6100873 - DNA, 20 bp, Homo sapien
atctggcgacgctatgacgt

SEQ ID NO: 6100874 - DNA, 20 bp, Homo sapien
tacgaggttgctatgtatgc

SEQ ID NO: 6100875 - DNA, 20 bp, Homo sapien
gcatacatagcaacctcgta

SEQ ID NO: 6100876 - DNA, 20 bp, Homo sapien
gtacatcttgactgagtgtg

SEQ ID NO: 6100877 - DNA, 20 bp, Homo sapien
cacactcagtcaagatgtac

SEQ ID NO: 6100878 - DNA, 20 bp, Homo sapien
gcacttaatgtagtctgtcg

SEQ ID NO: 6100879 - DNA, 20 bp, Homo sapien
cgacagactacattaagtgc

SEQ ID NO: 6100880 - DNA, 20 bp, Homo sapien
caactcagtctaatcgtcag

SEQ ID NO: 6100881 - DNA, 20 bp, Homo sapien
ctgacgattagactgagttg

SEQ ID NO: 6100882 - DNA, 20 bp, Homo sapien
caactactgagcggtgtgca

SEQ ID NO: 6100883 - DNA, 20 bp, Homo sapien
tgcacaccgctcagtagttg

SEQ ID NO: 6100884 - DNA, 20 bp, Homo sapien
atagcataggtgcaaggctc

SEQ ID NO: 6100885 - DNA, 20 bp, Homo sapien
gagccttgcacctatgctat

SEQ ID NO: 6100886 - DNA, 20 bp, Homo sapien
acggaccatgacaggctgat

SEQ ID NO: 6100887 - DNA, 20 bp, Homo sapien
atcagcctgtcatggtccgt

SEQ ID NO: 6100888 - DNA, 20 bp, Homo sapien
tcgtatattggtgactaggc

SEQ ID NO: 6100889 - DNA, 20 bp, Homo sapien
gcctagtcaccaatatacga

SEQ ID NO: 6100890 - DNA, 20 bp, Homo sapien
acgctccatccaatatagag

SEQ ID NO: 6100891 - DNA, 20 bp, Homo sapien
ctctatattggatggagcgt

SEQ ID NO: 6100892 - DNA, 20 bp, Homo sapien
tgagcttattgtcgtagagc

SEQ ID NO: 6100893 - DNA, 20 bp, Homo sapien
gctctacgacaataagctca

SEQ ID NO: 6100894 - DNA, 20 bp, Homo sapien
taccgctgtgtgtatgtcgc

SEQ ID NO: 6100895 - DNA, 20 bp, Homo sapien
gcgacatacacacagcggta

SEQ ID NO: 6100896 - DNA, 20 bp, Homo sapien
gtaatagcttcgtgccatgt

SEQ ID NO: 6100897 - DNA, 20 bp, Homo sapien
acatggcacgaagctattac

SEQ ID NO: 6100898 - DNA, 20 bp, Homo sapien
gtaacacttgagatgcagtc

SEQ ID NO: 6100899 - DNA, 20 bp, Homo sapien
gactgcatctcaagtgttac

SEQ ID NO: 6100900 - DNA, 20 bp, Homo sapien
gctacatcttccgtactatg

SEQ ID NO: 6100901 - DNA, 20 bp, Homo sapien
catagtacggaagatgtagc

SEQ ID NO: 6100902 - DNA, 20 bp, Homo sapien
gctacaactgtctggcgtga

SEQ ID NO: 6100903 - DNA, 20 bp, Homo sapien
tcacgccagacagttgtagc

SEQ ID NO: 6100904 - DNA, 20 bp, Homo sapien
gcactcgctgtgtactagga

SEQ ID NO: 6100905 - DNA, 20 bp, Homo sapien
tcctagtacacagcgagtgc

SEQ ID NO: 6100906 - DNA, 20 bp, Homo sapien
gcactcccttatgcagtagt

SEQ ID NO: 6100907 - DNA, 20 bp, Homo sapien
actactgcataagggagtgc

SEQ ID NO: 6100908 - DNA, 20 bp, Homo sapien
ctccagtctgctgcggatat

SEQ ID NO: 6100909 - DNA, 20 bp, Homo sapien
atatccgcagcagactggag

SEQ ID NO: 6100910 - DNA, 20 bp, Homo sapien
gtggatacttctctgagtgc

SEQ ID NO: 6100911 - DNA, 20 bp, Homo sapien
gcactcagagaagtatccac

SEQ ID NO: 6100912 - DNA, 20 bp, Homo sapien
ctccactgtactgcatgtag

SEQ ID NO: 6100913 - DNA, 20 bp, Homo sapien
ctacatgcagtacagtggag

SEQ ID NO: 6100914 - DNA, 20 bp, Homo sapien
cgacacgatgctgcaactgt

SEQ ID NO: 6100915 - DNA, 20 bp, Homo sapien
acagttgcagcatcgtgtcg

SEQ ID NO: 6100916 - DNA, 20 bp, Homo sapien
caactacgtctagcgcatag

SEQ ID NO: 6100917 - DNA, 20 bp, Homo sapien
ctatgcgctagacgtagttg

SEQ ID NO: 6100918 - DNA, 20 bp, Homo sapien
acgctaatgacggcagtgca

SEQ ID NO: 6100919 - DNA, 20 bp, Homo sapien
tgcactgccgtcattagcgt

SEQ ID NO: 6100920 - DNA, 20 bp, Homo sapien
acgcggtcactcagcatata

SEQ ID NO: 6100921 - DNA, 20 bp, Homo sapien
tatatgctgagtgaccgcgt

SEQ ID NO: 6100922 - DNA, 20 bp, Homo sapien
acgcgccgtgagcaagatat

SEQ ID NO: 6100923 - DNA, 20 bp, Homo sapien
atatcttgctcacggcgcgt

SEQ ID NO: 6100924 - DNA, 20 bp, Homo sapien
tgagcgtatttgctgtcaga

SEQ ID NO: 6100925 - DNA, 20 bp, Homo sapien
tctgacagcaaatacgctca

SEQ ID NO: 6100926 - DNA, 20 bp, Homo sapien
tcagcgcgtgtcgttgcata

SEQ ID NO: 6100927 - DNA, 20 bp, Homo sapien
tatgcaacgacacgcgctga

SEQ ID NO: 6100928 - DNA, 20 bp, Homo sapien
taccgcgcttgggacatgat

SEQ ID NO: 6100929 - DNA, 20 bp, Homo sapien
atcatgtcccaagcgcggta

SEQ ID NO: 6100930 - DNA, 20 bp, Homo sapien
ggttcctctgatgtgctaga

SEQ ID NO: 6100931 - DNA, 20 bp, Homo sapien
tctagcacatcagaggaacc

SEQ ID NO: 6100932 - DNA, 20 bp, Homo sapien
ggatcatcttcgaggtgtct

SEQ ID NO: 6100933 - DNA, 20 bp, Homo sapien
agacacctcgaagatgatcc

SEQ ID NO: 6100934 - DNA, 20 bp, Homo sapien
gctaagactggtgtatgctc

SEQ ID NO: 6100935 - DNA, 20 bp, Homo sapien
gagcatacaccagtcttagc

SEQ ID NO: 6100936 - DNA, 20 bp, Homo sapien
gcgttattcagatcgagtga

SEQ ID NO: 6100937 - DNA, 20 bp, Homo sapien
tcactcgatctgaataacgc

SEQ ID NO: 6100938 - DNA, 20 bp, Homo sapien
gcgtgtgattcctagtaatg

SEQ ID NO: 6100939 - DNA, 20 bp, Homo sapien
cattactaggaatcacacgc

SEQ ID NO: 6100940 - DNA, 20 bp, Homo sapien
gcacgctatggtcgcatcta

SEQ ID NO: 6100941 - DNA, 20 bp, Homo sapien
tagatgcgaccatagcgtgc

SEQ ID NO: 6100942 - DNA, 20 bp, Homo sapien
gcacgcgatgtcgtcagtaa

SEQ ID NO: 6100943 - DNA, 20 bp, Homo sapien
ttactgacgacatcgcgtgc

SEQ ID NO: 6100944 - DNA, 20 bp, Homo sapien
ctcatctatgtccagtgcta

SEQ ID NO: 6100945 - DNA, 20 bp, Homo sapien
tagcactggacatagatgag

SEQ ID NO: 6100946 - DNA, 20 bp, Homo sapien
cgaatatgtcacgtcatctc

SEQ ID NO: 6100947 - DNA, 20 bp, Homo sapien
gagatgacgtgacatattcg

SEQ ID NO: 6100948 - DNA, 20 bp, Homo sapien
atactgtcaagcgcgatggc

SEQ ID NO: 6100949 - DNA, 20 bp, Homo sapien
gccatcgcgcttgacagtat

SEQ ID NO: 6100950 - DNA, 20 bp, Homo sapien
acgcgagctatatgagcacg

SEQ ID NO: 6100951 - DNA, 20 bp, Homo sapien
cgtgctcatatagctcgcgt

SEQ ID NO: 6100952 - DNA, 20 bp, Homo sapien
acgcctctcactatatgaag

SEQ ID NO: 6100953 - DNA, 20 bp, Homo sapien
cttcatatagtgagaggcgt

SEQ ID NO: 6100954 - DNA, 20 bp, Homo sapien
gactcttatactctctgcgg

SEQ ID NO: 6100955 - DNA, 20 bp, Homo sapien
ccgcagagagtataagagtc

SEQ ID NO: 6100956 - DNA, 20 bp, Homo sapien
gcgtgtactgtatctcgtgc

SEQ ID NO: 6100957 - DNA, 20 bp, Homo sapien
gcacgagatacagtacacgc

SEQ ID NO: 6100958 - DNA, 20 bp, Homo sapien
gcgtgggcttcagtctctat

SEQ ID NO: 6100959 - DNA, 20 bp, Homo sapien
atagagactgaagcccacgc

SEQ ID NO: 6100960 - DNA, 20 bp, Homo sapien
gcacgcaattcgacagctat

SEQ ID NO: 6100961 - DNA, 20 bp, Homo sapien
atagctgtcgaattgcgtgc

SEQ ID NO: 6100962 - DNA, 20 bp, Homo sapien
ctcatacattagatggacgg

SEQ ID NO: 6100963 - DNA, 20 bp, Homo sapien
ccgtccatctaatgtatgag

SEQ ID NO: 6100964 - DNA, 20 bp, Homo sapien
caacatcctgcatactagag

SEQ ID NO: 6100965 - DNA, 20 bp, Homo sapien
ctctagtatgcaggatgttg

SEQ ID NO: 6100966 - DNA, 20 bp, Homo sapien
caacagaatgcacgtcagtc

SEQ ID NO: 6100967 - DNA, 20 bp, Homo sapien
gactgacgtgcattctgttg

SEQ ID NO: 6100968 - DNA, 20 bp, Homo sapien
tcagcacattggtacactgt

SEQ ID NO: 6100969 - DNA, 20 bp, Homo sapien
acagtgtaccaatgtgctga

SEQ ID NO: 6100970 - DNA, 20 bp, Homo sapien
gcgtgcgatgtctgataata

SEQ ID NO: 6100971 - DNA, 20 bp, Homo sapien
tattatcagacatcgcacgc

SEQ ID NO: 6100972 - DNA, 20 bp, Homo sapien
gcaccgtctgtcgatctata

SEQ ID NO: 6100973 - DNA, 20 bp, Homo sapien
tatagatcgacagacggtgc

SEQ ID NO: 6100974 - DNA, 20 bp, Homo sapien
ctcagatatagtcatcgctg

SEQ ID NO: 6100975 - DNA, 20 bp, Homo sapien
cagcgatgactatatctgag

SEQ ID NO: 6100976 - DNA, 20 bp, Homo sapien
gactctgtcgatagctgtgt

SEQ ID NO: 6100977 - DNA, 20 bp, Homo sapien
acacagctatcgacagagtc

SEQ ID NO: 6100978 - DNA, 20 bp, Homo sapien
cagtgacgtgagtgccatct

SEQ ID NO: 6100979 - DNA, 20 bp, Homo sapien
agatggcactcacgtcactg

SEQ ID NO: 6100980 - DNA, 20 bp, Homo sapien
caacactggagactcgtgca

SEQ ID NO: 6100981 - DNA, 20 bp, Homo sapien
tgcacgagtctccagtgttg

SEQ ID NO: 6100982 - DNA, 20 bp, Homo sapien
ataccggctgctacacagtg

SEQ ID NO: 6100983 - DNA, 20 bp, Homo sapien
cactgtgtagcagccggtat

SEQ ID NO: 6100984 - DNA, 20 bp, Homo sapien
acgcacactgataactatgc

SEQ ID NO: 6100985 - DNA, 20 bp, Homo sapien
gcatagttatcagtgtgcgt

SEQ ID NO: 6100986 - DNA, 20 bp, Homo sapien
tgtgagactttctgcgctgc

SEQ ID NO: 6100987 - DNA, 20 bp, Homo sapien
gcagcgcagaaagtctcaca

SEQ ID NO: 6100988 - DNA, 20 bp, Homo sapien
tgagactatttaggctgtgc

SEQ ID NO: 6100989 - DNA, 20 bp, Homo sapien
gcacagcctaaatagtctca

SEQ ID NO: 6100990 - DNA, 20 bp, Homo sapien
tcagacaattctatacgcgg

SEQ ID NO: 6100991 - DNA, 20 bp, Homo sapien
ccgcgtatagaattgtctga

SEQ ID NO: 6100992 - DNA, 20 bp, Homo sapien
tacatcgcttgcatgagtgt

SEQ ID NO: 6100993 - DNA, 20 bp, Homo sapien
acactcatgcaagcgatgta

SEQ ID NO: 6100994 - DNA, 20 bp, Homo sapien
gcgtcggcttcatgcgatat

SEQ ID NO: 6100995 - DNA, 20 bp, Homo sapien
atatcgcatgaagccgacgc

SEQ ID NO: 6100996 - DNA, 20 bp, Homo sapien
gcaccctgtgtcagctagta

SEQ ID NO: 6100997 - DNA, 20 bp, Homo sapien
tactagctgacacagggtgc

SEQ ID NO: 6100998 - DNA, 20 bp, Homo sapien
gactctagtgtcgtctgatc

SEQ ID NO: 6100999 - DNA, 20 bp, Homo sapien
gatcagacgacactagagtc

SEQ ID NO: 6101000 - DNA, 20 bp, Homo sapien
taactaggtgtgtgtcatgc

SEQ ID NO: 6101001 - DNA, 20 bp, Homo sapien
gcatgacacacacctagtta

SEQ ID NO: 6101002 - DNA, 20 bp, Homo sapien
ctcagacatgctccatagta

SEQ ID NO: 6101003 - DNA, 20 bp, Homo sapien
tactatggagcatgtctgag

SEQ ID NO: 6101004 - DNA, 20 bp, Homo sapien
ctcactcattacgatgcagt

SEQ ID NO: 6101005 - DNA, 20 bp, Homo sapien
actgcatcgtaatgagtgag

SEQ ID NO: 6101006 - DNA, 20 bp, Homo sapien
cagtgaatgcgagtccgtct

SEQ ID NO: 6101007 - DNA, 20 bp, Homo sapien
agacggactcgcattcactg

SEQ ID NO: 6101008 - DNA, 20 bp, Homo sapien
cagtcgctggcagtcgataa

SEQ ID NO: 6101009 - DNA, 20 bp, Homo sapien
ttatcgactgccagcgactg

SEQ ID NO: 6101010 - DNA, 20 bp, Homo sapien
ataccgactgcatcgcgtga

SEQ ID NO: 6101011 - DNA, 20 bp, Homo sapien
tcacgcgatgcagtcggtat

SEQ ID NO: 6101012 - DNA, 20 bp, Homo sapien
atacatgagcatagctgcgt

SEQ ID NO: 6101013 - DNA, 20 bp, Homo sapien
acgcagctatgctcatgtat

SEQ ID NO: 6101014 - DNA, 20 bp, Homo sapien
acgatcaatcctcatagcgt

SEQ ID NO: 6101015 - DNA, 20 bp, Homo sapien
acgctatgaggattgatcgt

SEQ ID NO: 6101016 - DNA, 20 bp, Homo sapien
ggtcgtgctgtctctctaca

SEQ ID NO: 6101017 - DNA, 20 bp, Homo sapien
tgtagagagacagcacgacc

SEQ ID NO: 6101018 - DNA, 20 bp, Homo sapien
cagtccgtgatcctcgatag

SEQ ID NO: 6101019 - DNA, 20 bp, Homo sapien
ctatcgaggatcacggactg

SEQ ID NO: 6101020 - DNA, 20 bp, Homo sapien
cagtcagctctaagtcgtca

SEQ ID NO: 6101021 - DNA, 20 bp, Homo sapien
tgacgacttagagctgactg

SEQ ID NO: 6101022 - DNA, 20 bp, Homo sapien
ccactctggatacatatagc

SEQ ID NO: 6101023 - DNA, 20 bp, Homo sapien
gctatatgtatccagagtgg

SEQ ID NO: 6101024 - DNA, 20 bp, Homo sapien
cagtcacctgatcgggatgt

SEQ ID NO: 6101025 - DNA, 20 bp, Homo sapien
acatcccgatcaggtgactg

SEQ ID NO: 6101026 - DNA, 20 bp, Homo sapien
caaagcgtgctcctacatag

SEQ ID NO: 6101027 - DNA, 20 bp, Homo sapien
ctatgtaggagcacgctttg

SEQ ID NO: 6101028 - DNA, 20 bp, Homo sapien
acgagacgtgacgactgcat

SEQ ID NO: 6101029 - DNA, 20 bp, Homo sapien
atgcagtcgtcacgtctcgt

SEQ ID NO: 6101030 - DNA, 20 bp, Homo sapien
acgacctatactgacagcat

SEQ ID NO: 6101031 - DNA, 20 bp, Homo sapien
atgctgtcagtataggtcgt

SEQ ID NO: 6101032 - DNA, 20 bp, Homo sapien
tgtctatgtttacagcgggc

SEQ ID NO: 6101033 - DNA, 20 bp, Homo sapien
gcccgctgtaaacatagaca

SEQ ID NO: 6101034 - DNA, 20 bp, Homo sapien
tgtcgttgttcagctcggca

SEQ ID NO: 6101035 - DNA, 20 bp, Homo sapien
tgccgagctgaacaacgaca

SEQ ID NO: 6101036 - DNA, 20 bp, Homo sapien
tgactacatttaggtgtggc

SEQ ID NO: 6101037 - DNA, 20 bp, Homo sapien
gccacacctaaatgtagtca

SEQ ID NO: 6101038 - DNA, 20 bp, Homo sapien
tgacgttattgtataggcgc

SEQ ID NO: 6101039 - DNA, 20 bp, Homo sapien
gcgcctatacaataacgtca

SEQ ID NO: 6101040 - DNA, 20 bp, Homo sapien
tacagctattggagacgatg

SEQ ID NO: 6101041 - DNA, 20 bp, Homo sapien
catcgtctccaatagctgta

SEQ ID NO: 6101042 - DNA, 20 bp, Homo sapien
tacagcagtgtgtcttatgc

SEQ ID NO: 6101043 - DNA, 20 bp, Homo sapien
gcataagacacactgctgta

SEQ ID NO: 6101044 - DNA, 20 bp, Homo sapien
cactgcgatgcactcggatt

SEQ ID NO: 6101045 - DNA, 20 bp, Homo sapien
aatccgagtgcatcgcagtg

SEQ ID NO: 6101046 - DNA, 20 bp, Homo sapien
gcgtaatctctgtctagctc

SEQ ID NO: 6101047 - DNA, 20 bp, Homo sapien
gagctagacagagattacgc

SEQ ID NO: 6101048 - DNA, 20 bp, Homo sapien
cctgcgaatgagtcgtcagt

SEQ ID NO: 6101049 - DNA, 20 bp, Homo sapien
actgacgactcattcgcagg

SEQ ID NO: 6101050 - DNA, 20 bp, Homo sapien
cagtatcgtcgaatctggat

SEQ ID NO: 6101051 - DNA, 20 bp, Homo sapien
atccagattcgacgatactg

SEQ ID NO: 6101052 - DNA, 20 bp, Homo sapien
ataatcgtgagcagtcgtcg

SEQ ID NO: 6101053 - DNA, 20 bp, Homo sapien
cgacgactgctcacgattat

SEQ ID NO: 6101054 - DNA, 20 bp, Homo sapien
ataatagatcatacgcgccg

SEQ ID NO: 6101055 - DNA, 20 bp, Homo sapien
cggcgcgtatgatctattat

SEQ ID NO: 6101056 - DNA, 20 bp, Homo sapien
acgacagtgagccgcagata

SEQ ID NO: 6101057 - DNA, 20 bp, Homo sapien
tatctgcggctcactgtcgt

SEQ ID NO: 6101058 - DNA, 20 bp, Homo sapien
tgacgtgctttagctgtagc

SEQ ID NO: 6101059 - DNA, 20 bp, Homo sapien
gctacagctaaagcacgtca

SEQ ID NO: 6101060 - DNA, 20 bp, Homo sapien
tacacgtatgttcgatgctg

SEQ ID NO: 6101061 - DNA, 20 bp, Homo sapien
cagcatcgaacatacgtgta

SEQ ID NO: 6101062 - DNA, 20 bp, Homo sapien
ggtcacagttattctctgca

SEQ ID NO: 6101063 - DNA, 20 bp, Homo sapien
tgcagagaataactgtgacc

SEQ ID NO: 6101064 - DNA, 20 bp, Homo sapien
ggtatcgcttcgcgtgtcat

SEQ ID NO: 6101065 - DNA, 20 bp, Homo sapien
atgacacgcgaagcgatacc

SEQ ID NO: 6101066 - DNA, 20 bp, Homo sapien
atgactcaggtgcgagccat

SEQ ID NO: 6101067 - DNA, 20 bp, Homo sapien
atggctcgcacctgagtcat

SEQ ID NO: 6101068 - DNA, 20 bp, Homo sapien
gcacagaatgtcgtgatgta

SEQ ID NO: 6101069 - DNA, 20 bp, Homo sapien
tacatcacgacattctgtgc

SEQ ID NO: 6101070 - DNA, 20 bp, Homo sapien
gcacactctgtcatcgtata

SEQ ID NO: 6101071 - DNA, 20 bp, Homo sapien
tatacgatgacagagtgtgc

SEQ ID NO: 6101072 - DNA, 20 bp, Homo sapien
ctcaacgtgcatctgctatg

SEQ ID NO: 6101073 - DNA, 20 bp, Homo sapien
catagcagatgcacgttgag

SEQ ID NO: 6101074 - DNA, 20 bp, Homo sapien
ctcaaatcttagcactcgtg

SEQ ID NO: 6101075 - DNA, 20 bp, Homo sapien
cacgagtgctaagatttgag

SEQ ID NO: 6101076 - DNA, 20 bp, Homo sapien
acgaacactctcagcgatga

SEQ ID NO: 6101077 - DNA, 20 bp, Homo sapien
tcatcgctgagagtgttcgt

SEQ ID NO: 6101078 - DNA, 20 bp, Homo sapien
acctgatgcacagagctatc

SEQ ID NO: 6101079 - DNA, 20 bp, Homo sapien
gatagctctgtgcatcaggt

SEQ ID NO: 6101080 - DNA, 20 bp, Homo sapien
acctcagctcatcatgtatg

SEQ ID NO: 6101081 - DNA, 20 bp, Homo sapien
catacatgatgagctgaggt

SEQ ID NO: 6101082 - DNA, 20 bp, Homo sapien
tgtccgcttgttacatgggc

SEQ ID NO: 6101083 - DNA, 20 bp, Homo sapien
gcccatgtaacaagcggaca

SEQ ID NO: 6101084 - DNA, 20 bp, Homo sapien
tcacgctcttgtagcacatt

SEQ ID NO: 6101085 - DNA, 20 bp, Homo sapien
aatgtgctacaagagcgtga

SEQ ID NO: 6101086 - DNA, 20 bp, Homo sapien
tacaatagttgcagtcgctg

SEQ ID NO: 6101087 - DNA, 20 bp, Homo sapien
cagcgactgcaactattgta

SEQ ID NO: 6101088 - DNA, 20 bp, Homo sapien
atgacgctgcatcgctcagt

SEQ ID NO: 6101089 - DNA, 20 bp, Homo sapien
actgagcgatgcagcgtcat

SEQ ID NO: 6101090 - DNA, 20 bp, Homo sapien
gggctgcgtgcttatctatc

SEQ ID NO: 6101091 - DNA, 20 bp, Homo sapien
gatagataagcacgcagccc

SEQ ID NO: 6101092 - DNA, 20 bp, Homo sapien
gcggtatgtcgtgctataat

SEQ ID NO: 6101093 - DNA, 20 bp, Homo sapien
attatagcacgacataccgc

SEQ ID NO: 6101094 - DNA, 20 bp, Homo sapien
gcggctgcttatcggtctat

SEQ ID NO: 6101095 - DNA, 20 bp, Homo sapien
atagaccgataagcagccgc

SEQ ID NO: 6101096 - DNA, 20 bp, Homo sapien
ctatgtcggatgctggccta

SEQ ID NO: 6101097 - DNA, 20 bp, Homo sapien
taggccagcatccgacatag

SEQ ID NO: 6101098 - DNA, 20 bp, Homo sapien
ctatgtaatgagctgtgcgc

SEQ ID NO: 6101099 - DNA, 20 bp, Homo sapien
gcgcacagctcattacatag

SEQ ID NO: 6101100 - DNA, 20 bp, Homo sapien
caggtatctgcaactatggt

SEQ ID NO: 6101101 - DNA, 20 bp, Homo sapien
accatagttgcagatacctg

SEQ ID NO: 6101102 - DNA, 20 bp, Homo sapien
atttagcatacatcgtcgcg

SEQ ID NO: 6101103 - DNA, 20 bp, Homo sapien
cgcgacgatgtatgctaaat

SEQ ID NO: 6101104 - DNA, 20 bp, Homo sapien
agtgtcgccagctccaatga

SEQ ID NO: 6101105 - DNA, 20 bp, Homo sapien
tcattggagctggcgacact

SEQ ID NO: 6101106 - DNA, 20 bp, Homo sapien
agtgtcctccgagctgagat

SEQ ID NO: 6101107 - DNA, 20 bp, Homo sapien
atctcagctcggaggacact

SEQ ID NO: 6101108 - DNA, 20 bp, Homo sapien
agtggcataagctccgctgt

SEQ ID NO: 6101109 - DNA, 20 bp, Homo sapien
acagcggagcttatgccact

SEQ ID NO: 6101110 - DNA, 20 bp, Homo sapien
aagtctaggagtcgcatcag

SEQ ID NO: 6101111 - DNA, 20 bp, Homo sapien
ctgatgcgactcctagactt

SEQ ID NO: 6101112 - DNA, 20 bp, Homo sapien
tcacgctatgttatgctcgc

SEQ ID NO: 6101113 - DNA, 20 bp, Homo sapien
gcgagcataacatagcgtga

SEQ ID NO: 6101114 - DNA, 20 bp, Homo sapien
tcacgcgctttacaagatgt

SEQ ID NO: 6101115 - DNA, 20 bp, Homo sapien
acatcttgtaaagcgcgtga

SEQ ID NO: 6101116 - DNA, 20 bp, Homo sapien
tacaacgattgcctgcctgt

SEQ ID NO: 6101117 - DNA, 20 bp, Homo sapien
acaggcaggcaatcgttgta

SEQ ID NO: 6101118 - DNA, 20 bp, Homo sapien
gcggctcatgtgtacgtcta

SEQ ID NO: 6101119 - DNA, 20 bp, Homo sapien
tagacgtacacatgagccgc

SEQ ID NO: 6101120 - DNA, 20 bp, Homo sapien
gcggcctatgtctcattagc

SEQ ID NO: 6101121 - DNA, 20 bp, Homo sapien
gctaatgagacataggccgc

SEQ ID NO: 6101122 - DNA, 20 bp, Homo sapien
cctctacgtgatgcctgata

SEQ ID NO: 6101123 - DNA, 20 bp, Homo sapien
tatcaggcatcacgtagagg

SEQ ID NO: 6101124 - DNA, 20 bp, Homo sapien
attgctggaatcgctgccca

SEQ ID NO: 6101125 - DNA, 20 bp, Homo sapien
tgggcagcgattccagcaat

SEQ ID NO: 6101126 - DNA, 20 bp, Homo sapien
agtgcatataactgaggctg

SEQ ID NO: 6101127 - DNA, 20 bp, Homo sapien
cagcctcagttatatgcact

SEQ ID NO: 6101128 - DNA, 20 bp, Homo sapien
tgaccacgtttcagaagctg

SEQ ID NO: 6101129 - DNA, 20 bp, Homo sapien
cagcttctgaaacgtggtca

SEQ ID NO: 6101130 - DNA, 20 bp, Homo sapien
tgacattattggttcggagc

SEQ ID NO: 6101131 - DNA, 20 bp, Homo sapien
gctccgaaccaataatgtca

SEQ ID NO: 6101132 - DNA, 20 bp, Homo sapien
gccgcaattagcgtctcttg

SEQ ID NO: 6101133 - DNA, 20 bp, Homo sapien
caagagacgctaattgcggc

SEQ ID NO: 6101134 - DNA, 20 bp, Homo sapien
gcggattcctagcacttcat

SEQ ID NO: 6101135 - DNA, 20 bp, Homo sapien
atgaagtgctaggaatccgc

SEQ ID NO: 6101136 - DNA, 20 bp, Homo sapien
ctatgagattacggtagctg

SEQ ID NO: 6101137 - DNA, 20 bp, Homo sapien
cagctaccgtaatctcatag

SEQ ID NO: 6101138 - DNA, 20 bp, Homo sapien
attgctcagaagtcgtgcat

SEQ ID NO: 6101139 - DNA, 20 bp, Homo sapien
atgcacgacttctgagcaat

SEQ ID NO: 6101140 - DNA, 20 bp, Homo sapien
attgcaggacgtgctagaca

SEQ ID NO: 6101141 - DNA, 20 bp, Homo sapien
tgtctagcacgtcctgcaat

SEQ ID NO: 6101142 - DNA, 20 bp, Homo sapien
agtgatctcgcagctcgaca

SEQ ID NO: 6101143 - DNA, 20 bp, Homo sapien
tgtcgagctgcgagatcact

SEQ ID NO: 6101144 - DNA, 20 bp, Homo sapien
agtgatcgcaccttatctcg

SEQ ID NO: 6101145 - DNA, 20 bp, Homo sapien
cgagataaggtgcgatcact

SEQ ID NO: 6101146 - DNA, 20 bp, Homo sapien
accatatagccatctaagcg

SEQ ID NO: 6101147 - DNA, 20 bp, Homo sapien
cgcttagatggctatatggt

SEQ ID NO: 6101148 - DNA, 20 bp, Homo sapien
accaggctgacgacgatgat

SEQ ID NO: 6101149 - DNA, 20 bp, Homo sapien
atcatcgtcgtcagcctggt

SEQ ID NO: 6101150 - DNA, 20 bp, Homo sapien
tgtatggctttcgagatcgc

SEQ ID NO: 6101151 - DNA, 20 bp, Homo sapien
gcgatctcgaaagccataca

SEQ ID NO: 6101152 - DNA, 20 bp, Homo sapien
tcacaggttggtctggtctc

SEQ ID NO: 6101153 - DNA, 20 bp, Homo sapien
gagaccagaccaacctgtga

SEQ ID NO: 6101154 - DNA, 20 bp, Homo sapien
gatcatccttcacgctagtt

SEQ ID NO: 6101155 - DNA, 20 bp, Homo sapien
aactagcgtgaaggatgatc

SEQ ID NO: 6101156 - DNA, 20 bp, Homo sapien
ctatcaggttacgatgactg

SEQ ID NO: 6101157 - DNA, 20 bp, Homo sapien
cagtcatcgtaacctgatag

SEQ ID NO: 6101158 - DNA, 20 bp, Homo sapien
ctatcagcttagcgcctatt

SEQ ID NO: 6101159 - DNA, 20 bp, Homo sapien
aataggcgctaagctgatag

SEQ ID NO: 6101160 - DNA, 20 bp, Homo sapien
ctatcacgttagatccactg

SEQ ID NO: 6101161 - DNA, 20 bp, Homo sapien
cagtggatctaacgtgatag

SEQ ID NO: 6101162 - DNA, 20 bp, Homo sapien
attcgtgcaaatctcgactg

SEQ ID NO: 6101163 - DNA, 20 bp, Homo sapien
cagtcgagatttgcacgaat

SEQ ID NO: 6101164 - DNA, 20 bp, Homo sapien
tgtagcgatttcgtgtagcc

SEQ ID NO: 6101165 - DNA, 20 bp, Homo sapien
ggctacacgaaatcgctaca

SEQ ID NO: 6101166 - DNA, 20 bp, Homo sapien
tgacagcgtttatagtgtgc

SEQ ID NO: 6101167 - DNA, 20 bp, Homo sapien
gcacactataaacgctgtca

SEQ ID NO: 6101168 - DNA, 20 bp, Homo sapien
tgacagactggttggttatc

SEQ ID NO: 6101169 - DNA, 20 bp, Homo sapien
gataaccaaccagtctgtca

SEQ ID NO: 6101170 - DNA, 20 bp, Homo sapien
gcgcttacttcagatgtatg

SEQ ID NO: 6101171 - DNA, 20 bp, Homo sapien
catacatctgaagtaagcgc

SEQ ID NO: 6101172 - DNA, 20 bp, Homo sapien
ctagtgctggatgatcgtcc

SEQ ID NO: 6101173 - DNA, 20 bp, Homo sapien
ggacgatcatccagcactag

SEQ ID NO: 6101174 - DNA, 20 bp, Homo sapien
ctagtgacttacgctgcatt

SEQ ID NO: 6101175 - DNA, 20 bp, Homo sapien
aatgcagcgtaagtcactag

SEQ ID NO: 6101176 - DNA, 20 bp, Homo sapien
gactcgtatgtgaagtgcta

SEQ ID NO: 6101177 - DNA, 20 bp, Homo sapien
tagcacttcacatacgagtc

SEQ ID NO: 6101178 - DNA, 20 bp, Homo sapien
cctatccctgagtctatatg

SEQ ID NO: 6101179 - DNA, 20 bp, Homo sapien
catatagactcagggatagg

SEQ ID NO: 6101180 - DNA, 20 bp, Homo sapien
cctacgctgctagagctgta

SEQ ID NO: 6101181 - DNA, 20 bp, Homo sapien
tacagctctagcagcgtagg

SEQ ID NO: 6101182 - DNA, 20 bp, Homo sapien
caggatgctactcactgcgt

SEQ ID NO: 6101183 - DNA, 20 bp, Homo sapien
acgcagtgagtagcatcctg

SEQ ID NO: 6101184 - DNA, 20 bp, Homo sapien
caggatcatcgtgactgagt

SEQ ID NO: 6101185 - DNA, 20 bp, Homo sapien
actcagtcacgatgatcctg

SEQ ID NO: 6101186 - DNA, 20 bp, Homo sapien
attccgagaactctgcatca

SEQ ID NO: 6101187 - DNA, 20 bp, Homo sapien
tgatgcagagttctcggaat

SEQ ID NO: 6101188 - DNA, 20 bp, Homo sapien
agtcgtcatacatccgtcat

SEQ ID NO: 6101189 - DNA, 20 bp, Homo sapien
atgacggatgtatgacgact

SEQ ID NO: 6101190 - DNA, 20 bp, Homo sapien
tgtacgtctttcatcaggcg

SEQ ID NO: 6101191 - DNA, 20 bp, Homo sapien
cgcctgatgaaagacgtaca

SEQ ID NO: 6101192 - DNA, 20 bp, Homo sapien
tgtaatgatttccacgctgg

SEQ ID NO: 6101193 - DNA, 20 bp, Homo sapien
ccagcgtggaaatcattaca

SEQ ID NO: 6101194 - DNA, 20 bp, Homo sapien
gagtcgtatgtatcatgtcg

SEQ ID NO: 6101195 - DNA, 20 bp, Homo sapien
cgacatgatacatacgactc

SEQ ID NO: 6101196 - DNA, 20 bp, Homo sapien
gacagattatgccggtgtat

SEQ ID NO: 6101197 - DNA, 20 bp, Homo sapien
atacaccggcataatctgtc

SEQ ID NO: 6101198 - DNA, 20 bp, Homo sapien
gactcgcattcactaacatg

SEQ ID NO: 6101199 - DNA, 20 bp, Homo sapien
catgttagtgaatgcgagtc

SEQ ID NO: 6101200 - DNA, 20 bp, Homo sapien
gacagaacttatcgctagtg

SEQ ID NO: 6101201 - DNA, 20 bp, Homo sapien
cactagcgataagttctgtc

SEQ ID NO: 6101202 - DNA, 20 bp, Homo sapien
ctagtcttagataccatgcg

SEQ ID NO: 6101203 - DNA, 20 bp, Homo sapien
cgcatggtatctaagactag

SEQ ID NO: 6101204 - DNA, 20 bp, Homo sapien
attacactgcatcggctgag

SEQ ID NO: 6101205 - DNA, 20 bp, Homo sapien
ctcagccgatgcagtgtaat

SEQ ID NO: 6101206 - DNA, 20 bp, Homo sapien
agtcatctgagacgctggac

SEQ ID NO: 6101207 - DNA, 20 bp, Homo sapien
gtccagcgtctcagatgact

SEQ ID NO: 6101208 - DNA, 20 bp, Homo sapien
agtcatagtacctcatgctc

SEQ ID NO: 6101209 - DNA, 20 bp, Homo sapien
gagcatgaggtactatgact

SEQ ID NO: 6101210 - DNA, 20 bp, Homo sapien
gcgcgtgctctgtatcgaat

SEQ ID NO: 6101211 - DNA, 20 bp, Homo sapien
attcgatacagagcacgcgc

SEQ ID NO: 6101212 - DNA, 20 bp, Homo sapien
ctagctgcttacaatctctg

SEQ ID NO: 6101213 - DNA, 20 bp, Homo sapien
cagagattgtaagcagctag

SEQ ID NO: 6101214 - DNA, 20 bp, Homo sapien
ccgtcttagagcacatgatc

SEQ ID NO: 6101215 - DNA, 20 bp, Homo sapien
gatcatgtgctctaagacgg

SEQ ID NO: 6101216 - DNA, 20 bp, Homo sapien
ccgtcaagtgctgagctgta

SEQ ID NO: 6101217 - DNA, 20 bp, Homo sapien
tacagctcagcacttgacgg

SEQ ID NO: 6101218 - DNA, 20 bp, Homo sapien
atgtctgcgaacgtatctag

SEQ ID NO: 6101219 - DNA, 20 bp, Homo sapien
ctagatacgttcgcagacat

SEQ ID NO: 6101220 - DNA, 20 bp, Homo sapien
cggtcctctgcatctataat

SEQ ID NO: 6101221 - DNA, 20 bp, Homo sapien
attatagatgcagaggaccg

SEQ ID NO: 6101222 - DNA, 20 bp, Homo sapien
gtctcagattctagtggtgc

SEQ ID NO: 6101223 - DNA, 20 bp, Homo sapien
gcaccactagaatctgagac

SEQ ID NO: 6101224 - DNA, 20 bp, Homo sapien
agtcacgctgagtccatgct

SEQ ID NO: 6101225 - DNA, 20 bp, Homo sapien
agcatggactcagcgtgact

SEQ ID NO: 6101226 - DNA, 20 bp, Homo sapien
agtcaatatactcggctgag

SEQ ID NO: 6101227 - DNA, 20 bp, Homo sapien
ctcagccgagtatattgact

SEQ ID NO: 6101228 - DNA, 20 bp, Homo sapien
agtcaagctagatgccgatc

SEQ ID NO: 6101229 - DNA, 20 bp, Homo sapien
gatcggcatctagcttgact

SEQ ID NO: 6101230 - DNA, 20 bp, Homo sapien
acatcagatcacgtaccagt

SEQ ID NO: 6101231 - DNA, 20 bp, Homo sapien
actggtacgtgatctgatgt

SEQ ID NO: 6101232 - DNA, 20 bp, Homo sapien
ggcttcagttgacgcgatct

SEQ ID NO: 6101233 - DNA, 20 bp, Homo sapien
agatcgcgtcaactgaagcc

SEQ ID NO: 6101234 - DNA, 20 bp, Homo sapien
gcgcgacgtgtctcgtatat

SEQ ID NO: 6101235 - DNA, 20 bp, Homo sapien
atatacgagacacgtcgcgc

SEQ ID NO: 6101236 - DNA, 20 bp, Homo sapien
gaggtagattccacgctatg

SEQ ID NO: 6101237 - DNA, 20 bp, Homo sapien
catagcgtggaatctacctc

SEQ ID NO: 6101238 - DNA, 20 bp, Homo sapien
ctagcgtgtcctcgcatagt

SEQ ID NO: 6101239 - DNA, 20 bp, Homo sapien
actatgcgaggacacgctag

SEQ ID NO: 6101240 - DNA, 20 bp, Homo sapien
ctagcgacttagcacgcatt

SEQ ID NO: 6101241 - DNA, 20 bp, Homo sapien
aatgcgtgctaagtcgctag

SEQ ID NO: 6101242 - DNA, 20 bp, Homo sapien
ctagcatgtagtcacaggtg

SEQ ID NO: 6101243 - DNA, 20 bp, Homo sapien
cacctgtgactacatgctag

SEQ ID NO: 6101244 - DNA, 20 bp, Homo sapien
cgggatgtcgcactcgatat

SEQ ID NO: 6101245 - DNA, 20 bp, Homo sapien
atatcgagtgcgacatcccg

SEQ ID NO: 6101246 - DNA, 20 bp, Homo sapien
ccggtatatgctctacatct

SEQ ID NO: 6101247 - DNA, 20 bp, Homo sapien
agatgtagagcatataccgg

SEQ ID NO: 6101248 - DNA, 20 bp, Homo sapien
ccggcacatgctaatactga

SEQ ID NO: 6101249 - DNA, 20 bp, Homo sapien
tcagtattagcatgtgccgg

SEQ ID NO: 6101250 - DNA, 20 bp, Homo sapien
cagctcagtctacgtgcagt

SEQ ID NO: 6101251 - DNA, 20 bp, Homo sapien
actgcacgtagactgagctg

SEQ ID NO: 6101252 - DNA, 20 bp, Homo sapien
agtagacgtgcatagcagtt

SEQ ID NO: 6101253 - DNA, 20 bp, Homo sapien
aactgctatgcacgtctact

SEQ ID NO: 6101254 - DNA, 20 bp, Homo sapien
taagcaggttgcgccagcta

SEQ ID NO: 6101255 - DNA, 20 bp, Homo sapien
tagctggcgcaacctgctta

SEQ ID NO: 6101256 - DNA, 20 bp, Homo sapien
ggctgctgttacatgctgtc

SEQ ID NO: 6101257 - DNA, 20 bp, Homo sapien
gacagcatgtaacagcagcc

SEQ ID NO: 6101258 - DNA, 20 bp, Homo sapien
ggctgacattgacgctactt

SEQ ID NO: 6101259 - DNA, 20 bp, Homo sapien
aagtagcgtcaatgtcagcc

SEQ ID NO: 6101260 - DNA, 20 bp, Homo sapien
gcgccgtgtgtcaagtcata

SEQ ID NO: 6101261 - DNA, 20 bp, Homo sapien
tatgacttgacacacggcgc

SEQ ID NO: 6101262 - DNA, 20 bp, Homo sapien
gcgccgaatgtgtctgtaat

SEQ ID NO: 6101263 - DNA, 20 bp, Homo sapien
attacagacacattcggcgc

SEQ ID NO: 6101264 - DNA, 20 bp, Homo sapien
gaggcatgtcgtccgtcata

SEQ ID NO: 6101265 - DNA, 20 bp, Homo sapien
tatgacggacgacatgcctc

SEQ ID NO: 6101266 - DNA, 20 bp, Homo sapien
ccacggcatgtacgagcata

SEQ ID NO: 6101267 - DNA, 20 bp, Homo sapien
tatgctcgtacatgccgtgg

SEQ ID NO: 6101268 - DNA, 20 bp, Homo sapien
ctagcagctcgtgcggatta

SEQ ID NO: 6101269 - DNA, 20 bp, Homo sapien
taatccgcacgagctgctag

SEQ ID NO: 6101270 - DNA, 20 bp, Homo sapien
ctagcacttaggcgcgtgat

SEQ ID NO: 6101271 - DNA, 20 bp, Homo sapien
atcacgcgcctaagtgctag

SEQ ID NO: 6101272 - DNA, 20 bp, Homo sapien
ccggaatctgctgagcgtat

SEQ ID NO: 6101273 - DNA, 20 bp, Homo sapien
atacgctcagcagattccgg

SEQ ID NO: 6101274 - DNA, 20 bp, Homo sapien
ccgctgctgcactgatatga

SEQ ID NO: 6101275 - DNA, 20 bp, Homo sapien
tcatatcagtgcagcagcgg

SEQ ID NO: 6101276 - DNA, 20 bp, Homo sapien
agtacaatgccatacgctct

SEQ ID NO: 6101277 - DNA, 20 bp, Homo sapien
agagcgtatggcattgtact

SEQ ID NO: 6101278 - DNA, 20 bp, Homo sapien
acagtccatgaccagcgatg

SEQ ID NO: 6101279 - DNA, 20 bp, Homo sapien
catcgctggtcatggactgt

SEQ ID NO: 6101280 - DNA, 20 bp, Homo sapien
acaggtcatcgaactctcag

SEQ ID NO: 6101281 - DNA, 20 bp, Homo sapien
ctgagagttcgatgacctgt

SEQ ID NO: 6101282 - DNA, 20 bp, Homo sapien
acaggcgctgcaaccgatat

SEQ ID NO: 6101283 - DNA, 20 bp, Homo sapien
atatcggttgcagcgcctgt

SEQ ID NO: 6101284 - DNA, 20 bp, Homo sapien
tggtcgtgtttcagatgaca

SEQ ID NO: 6101285 - DNA, 20 bp, Homo sapien
tgtcatctgaaacacgacca

SEQ ID NO: 6101286 - DNA, 20 bp, Homo sapien
tgaagacatttagcgtcgtg

SEQ ID NO: 6101287 - DNA, 20 bp, Homo sapien
cacgacgctaaatgtcttca

SEQ ID NO: 6101288 - DNA, 20 bp, Homo sapien
cactgatcgagcattaagac

SEQ ID NO: 6101289 - DNA, 20 bp, Homo sapien
gtcttaatgctcgatcagtg

SEQ ID NO: 6101290 - DNA, 20 bp, Homo sapien
tgaacgtgtcgtgttatgca

SEQ ID NO: 6101291 - DNA, 20 bp, Homo sapien
tgcataacacgacacgttca

SEQ ID NO: 6101292 - DNA, 20 bp, Homo sapien
taagactattgcgagagctg

SEQ ID NO: 6101293 - DNA, 20 bp, Homo sapien
cagctctcgcaatagtctta

SEQ ID NO: 6101294 - DNA, 20 bp, Homo sapien
gattcacatcgtggtgtagt

SEQ ID NO: 6101295 - DNA, 20 bp, Homo sapien
actacaccacgatgtgaatc

SEQ ID NO: 6101296 - DNA, 20 bp, Homo sapien
ctagactgtccatcgctatg

SEQ ID NO: 6101297 - DNA, 20 bp, Homo sapien
catagcgatggacagtctag

SEQ ID NO: 6101298 - DNA, 20 bp, Homo sapien
ccgcgtcatgctaactgata

SEQ ID NO: 6101299 - DNA, 20 bp, Homo sapien
tatcagttagcatgacgcgg

SEQ ID NO: 6101300 - DNA, 20 bp, Homo sapien
atggctcacgctctacgagt

SEQ ID NO: 6101301 - DNA, 20 bp, Homo sapien
actcgtagagcgtgagccat

SEQ ID NO: 6101302 - DNA, 20 bp, Homo sapien
atggctacagctatctaggt

SEQ ID NO: 6101303 - DNA, 20 bp, Homo sapien
acctagatagctgtagccat

SEQ ID NO: 6101304 - DNA, 20 bp, Homo sapien
atggcggtcagtcgctcaat

SEQ ID NO: 6101305 - DNA, 20 bp, Homo sapien
attgagcgactgaccgccat

SEQ ID NO: 6101306 - DNA, 20 bp, Homo sapien
gcgcatagttccagtgctgt

SEQ ID NO: 6101307 - DNA, 20 bp, Homo sapien
acagcactggaactatgcgc

SEQ ID NO: 6101308 - DNA, 20 bp, Homo sapien
gattagactggtgctctgct

SEQ ID NO: 6101309 - DNA, 20 bp, Homo sapien
agcagagcaccagtctaatc

SEQ ID NO: 6101310 - DNA, 20 bp, Homo sapien
atgacgcctggacctagatg

SEQ ID NO: 6101311 - DNA, 20 bp, Homo sapien
catctaggtccaggcgtcat

SEQ ID NO: 6101312 - DNA, 20 bp, Homo sapien
gaatctatgatgctcgtgct

SEQ ID NO: 6101313 - DNA, 20 bp, Homo sapien
agcacgagcatcatagattc

SEQ ID NO: 6101314 - DNA, 20 bp, Homo sapien
gaatcgcttatacgctatgc

SEQ ID NO: 6101315 - DNA, 20 bp, Homo sapien
gcatagcgtataagcgattc

SEQ ID NO: 6101316 - DNA, 20 bp, Homo sapien
cagcgatatagcctggattg

SEQ ID NO: 6101317 - DNA, 20 bp, Homo sapien
caatccaggctatatcgctg

SEQ ID NO: 6101318 - DNA, 20 bp, Homo sapien
cagcgactgatcctagtgca

SEQ ID NO: 6101319 - DNA, 20 bp, Homo sapien
tgcactaggatcagtcgctg

SEQ ID NO: 6101320 - DNA, 20 bp, Homo sapien
atggcacatgcactcgcgta

SEQ ID NO: 6101321 - DNA, 20 bp, Homo sapien
tacgcgagtgcatgtgccat

SEQ ID NO: 6101322 - DNA, 20 bp, Homo sapien
atggcaatgcagcgagtctc

SEQ ID NO: 6101323 - DNA, 20 bp, Homo sapien
gagactcgctgcattgccat

SEQ ID NO: 6101324 - DNA, 20 bp, Homo sapien
acagccagtgaggacctgat

SEQ ID NO: 6101325 - DNA, 20 bp, Homo sapien
atcaggtcctcactggctgt

SEQ ID NO: 6101326 - DNA, 20 bp, Homo sapien
acagcagctcagcatctatg

SEQ ID NO: 6101327 - DNA, 20 bp, Homo sapien
catagatgctgagctgctgt

SEQ ID NO: 6101328 - DNA, 20 bp, Homo sapien
ggctatgattcgcaatgctt

SEQ ID NO: 6101329 - DNA, 20 bp, Homo sapien
aagcattgcgaatcatagcc

SEQ ID NO: 6101330 - DNA, 20 bp, Homo sapien
ggctatacttgacagtgatg

SEQ ID NO: 6101331 - DNA, 20 bp, Homo sapien
catcactgtcaagtatagcc

SEQ ID NO: 6101332 - DNA, 20 bp, Homo sapien
agccagatgcagacgagtca

SEQ ID NO: 6101333 - DNA, 20 bp, Homo sapien
tgactcgtctgcatctggct

SEQ ID NO: 6101334 - DNA, 20 bp, Homo sapien
gcgcagcgttccgacaatat

SEQ ID NO: 6101335 - DNA, 20 bp, Homo sapien
atattgtcggaacgctgcgc

SEQ ID NO: 6101336 - DNA, 20 bp, Homo sapien
gatgtctatgcagctctctc

SEQ ID NO: 6101337 - DNA, 20 bp, Homo sapien
gagagagctgcatagacatc

SEQ ID NO: 6101338 - DNA, 20 bp, Homo sapien
ctaccatcttagagagagtg

SEQ ID NO: 6101339 - DNA, 20 bp, Homo sapien
cactctctctaagatggtag

SEQ ID NO: 6101340 - DNA, 20 bp, Homo sapien
atggatctagctgcacggct

SEQ ID NO: 6101341 - DNA, 20 bp, Homo sapien
agccgtgcagctagatccat

SEQ ID NO: 6101342 - DNA, 20 bp, Homo sapien
aggctagatgcactgccact

SEQ ID NO: 6101343 - DNA, 20 bp, Homo sapien
agtggcagtgcatctagcct

SEQ ID NO: 6101344 - DNA, 20 bp, Homo sapien
aggcgtctgaatcgcaatgc

SEQ ID NO: 6101345 - DNA, 20 bp, Homo sapien
gcattgcgattcagacgcct

SEQ ID NO: 6101346 - DNA, 20 bp, Homo sapien
acagataatcatcgacgctc

SEQ ID NO: 6101347 - DNA, 20 bp, Homo sapien
gagcgtcgatgattatctgt

SEQ ID NO: 6101348 - DNA, 20 bp, Homo sapien
acagaggtctagcacgctca

SEQ ID NO: 6101349 - DNA, 20 bp, Homo sapien
tgagcgtgctagacctctgt

SEQ ID NO: 6101350 - DNA, 20 bp, Homo sapien
acagagctacgtccagatca

SEQ ID NO: 6101351 - DNA, 20 bp, Homo sapien
tgatctggacgtagctctgt

SEQ ID NO: 6101352 - DNA, 20 bp, Homo sapien
ggctactattcgatcatacg

SEQ ID NO: 6101353 - DNA, 20 bp, Homo sapien
cgtatgatcgaatagtagcc

SEQ ID NO: 6101354 - DNA, 20 bp, Homo sapien
agccacgatctataagagtg

SEQ ID NO: 6101355 - DNA, 20 bp, Homo sapien
cactcttatagatcgtggct

SEQ ID NO: 6101356 - DNA, 20 bp, Homo sapien
ggctacgctgttatgcaatc

SEQ ID NO: 6101357 - DNA, 20 bp, Homo sapien
gattgcataacagcgtagcc

SEQ ID NO: 6101358 - DNA, 20 bp, Homo sapien
gcgcacacttcgacggatat

SEQ ID NO: 6101359 - DNA, 20 bp, Homo sapien
atatccgtcgaagtgtgcgc

SEQ ID NO: 6101360 - DNA, 20 bp, Homo sapien
gcgcaagattccgtgcctat

SEQ ID NO: 6101361 - DNA, 20 bp, Homo sapien
ataggcacggaatcttgcgc

SEQ ID NO: 6101362 - DNA, 20 bp, Homo sapien
ctacaccgtgctgctagtat

SEQ ID NO: 6101363 - DNA, 20 bp, Homo sapien
atactagcagcacggtgtag

SEQ ID NO: 6101364 - DNA, 20 bp, Homo sapien
cagccgaatggactatcgct

SEQ ID NO: 6101365 - DNA, 20 bp, Homo sapien
agcgatagtccattcggctg

SEQ ID NO: 6101366 - DNA, 20 bp, Homo sapien
atgctgtaccatcctgcgat

SEQ ID NO: 6101367 - DNA, 20 bp, Homo sapien
atcgcaggatggtacagcat

SEQ ID NO: 6101368 - DNA, 20 bp, Homo sapien
acagactggaacatcggctg

SEQ ID NO: 6101369 - DNA, 20 bp, Homo sapien
cagccgatgttccagtctgt

SEQ ID NO: 6101370 - DNA, 20 bp, Homo sapien
tcttctagttgtcgagcagg

SEQ ID NO: 6101371 - DNA, 20 bp, Homo sapien
cctgctcgacaactagaaga

SEQ ID NO: 6101372 - DNA, 20 bp, Homo sapien
ggcgtctgtcgtgctcataa

SEQ ID NO: 6101373 - DNA, 20 bp, Homo sapien
ttatgagcacgacagacgcc

SEQ ID NO: 6101374 - DNA, 20 bp, Homo sapien
gcgatgtctctacgtgtctc

SEQ ID NO: 6101375 - DNA, 20 bp, Homo sapien
gagacacgtagagacatcgc

SEQ ID NO: 6101376 - DNA, 20 bp, Homo sapien
ttgttatgttggcagccgcc

SEQ ID NO: 6101377 - DNA, 20 bp, Homo sapien
ggcggctgccaacataacaa

SEQ ID NO: 6101378 - DNA, 20 bp, Homo sapien
ccgacaatggctcagagtct

SEQ ID NO: 6101379 - DNA, 20 bp, Homo sapien
agactctgagccattgtcgg

SEQ ID NO: 6101380 - DNA, 20 bp, Homo sapien
acacgcgatctcagacagga

SEQ ID NO: 6101381 - DNA, 20 bp, Homo sapien
tcctgtctgagatcgcgtgt

SEQ ID NO: 6101382 - DNA, 20 bp, Homo sapien
tcttagattgtcgctacggc

SEQ ID NO: 6101383 - DNA, 20 bp, Homo sapien
gccgtagcgacaatctaaga

SEQ ID NO: 6101384 - DNA, 20 bp, Homo sapien
tattcgcgttctgtccgcag

SEQ ID NO: 6101385 - DNA, 20 bp, Homo sapien
ctgcggacagaacgcgaata

SEQ ID NO: 6101386 - DNA, 20 bp, Homo sapien
tattatgttctcagcgcggc

SEQ ID NO: 6101387 - DNA, 20 bp, Homo sapien
gccgcgctgagaacataata

SEQ ID NO: 6101388 - DNA, 20 bp, Homo sapien
gcgatctatgtggtgactat

SEQ ID NO: 6101389 - DNA, 20 bp, Homo sapien
atagtcaccacatagatcgc

SEQ ID NO: 6101390 - DNA, 20 bp, Homo sapien
gaagcgcgtcgatgtatcta

SEQ ID NO: 6101391 - DNA, 20 bp, Homo sapien
tagatacatcgacgcgcttc

SEQ ID NO: 6101392 - DNA, 20 bp, Homo sapien
ctaagagctggtcgcctcat

SEQ ID NO: 6101393 - DNA, 20 bp, Homo sapien
atgaggcgaccagctcttag

SEQ ID NO: 6101394 - DNA, 20 bp, Homo sapien
atgcgtctgagcctgagcta

SEQ ID NO: 6101395 - DNA, 20 bp, Homo sapien
tagctcaggctcagacgcat

SEQ ID NO: 6101396 - DNA, 20 bp, Homo sapien
acacgcagtcgtcaatcata

SEQ ID NO: 6101397 - DNA, 20 bp, Homo sapien
tatgattgacgactgcgtgt

SEQ ID NO: 6101398 - DNA, 20 bp, Homo sapien
gtggaagctgctcgttctca

SEQ ID NO: 6101399 - DNA, 20 bp, Homo sapien
tgagaacgagcagcttccac

SEQ ID NO: 6101400 - DNA, 20 bp, Homo sapien
tctgtgtcttgatggcgcac

SEQ ID NO: 6101401 - DNA, 20 bp, Homo sapien
gtgcgccatcaagacacaga

SEQ ID NO: 6101402 - DNA, 20 bp, Homo sapien
tattagtattggagctgcgc

SEQ ID NO: 6101403 - DNA, 20 bp, Homo sapien
gcgcagctccaatactaata

SEQ ID NO: 6101404 - DNA, 20 bp, Homo sapien
tattagcattgcgtggctgc

SEQ ID NO: 6101405 - DNA, 20 bp, Homo sapien
gcagccacgcaatgctaata

SEQ ID NO: 6101406 - DNA, 20 bp, Homo sapien
ggcgctggtgctatctctta

SEQ ID NO: 6101407 - DNA, 20 bp, Homo sapien
taagagatagcaccagcgcc

SEQ ID NO: 6101408 - DNA, 20 bp, Homo sapien
ggcgcatatctgtctatact

SEQ ID NO: 6101409 - DNA, 20 bp, Homo sapien
agtatagacagatatgcgcc

SEQ ID NO: 6101410 - DNA, 20 bp, Homo sapien
gatggattagctgtcgtctc

SEQ ID NO: 6101411 - DNA, 20 bp, Homo sapien
gagacgacagctaatccatc

SEQ ID NO: 6101412 - DNA, 20 bp, Homo sapien
cccgacactgatctgagagt

SEQ ID NO: 6101413 - DNA, 20 bp, Homo sapien
actctcagatcagtgtcggg

SEQ ID NO: 6101414 - DNA, 20 bp, Homo sapien
cagcactgtcactacatgag

SEQ ID NO: 6101415 - DNA, 20 bp, Homo sapien
ctcatgtagtgacagtgctg

SEQ ID NO: 6101416 - DNA, 20 bp, Homo sapien
cagcacgctctatcgagaat

SEQ ID NO: 6101417 - DNA, 20 bp, Homo sapien
attctcgatagagcgtgctg

SEQ ID NO: 6101418 - DNA, 20 bp, Homo sapien
acacagagtgaaggcgctca

SEQ ID NO: 6101419 - DNA, 20 bp, Homo sapien
tgagcgccttcactctgtgt

SEQ ID NO: 6101420 - DNA, 20 bp, Homo sapien
ggacacgcttgacagaatgt

SEQ ID NO: 6101421 - DNA, 20 bp, Homo sapien
acattctgtcaagcgtgtcc

SEQ ID NO: 6101422 - DNA, 20 bp, Homo sapien
gttgtctctacttcgcgcag

SEQ ID NO: 6101423 - DNA, 20 bp, Homo sapien
ctgcgcgaagtagagacaac

SEQ ID NO: 6101424 - DNA, 20 bp, Homo sapien
ggcgcacgttgcacaagtat

SEQ ID NO: 6101425 - DNA, 20 bp, Homo sapien
atacttgtgcaacgtgcgcc

SEQ ID NO: 6101426 - DNA, 20 bp, Homo sapien
ggcgcacatggtatattatg

SEQ ID NO: 6101427 - DNA, 20 bp, Homo sapien
cataatataccatgtgcgcc

SEQ ID NO: 6101428 - DNA, 20 bp, Homo sapien
gcgaggtctgtcgtatatct

SEQ ID NO: 6101429 - DNA, 20 bp, Homo sapien
agatatacgacagacctcgc

SEQ ID NO: 6101430 - DNA, 20 bp, Homo sapien
gagcataattcacgcgatgg

SEQ ID NO: 6101431 - DNA, 20 bp, Homo sapien
ccatcgcgtgaattatgctc

SEQ ID NO: 6101432 - DNA, 20 bp, Homo sapien
gaagagtctgtagcctgctc

SEQ ID NO: 6101433 - DNA, 20 bp, Homo sapien
gagcaggctacagactcttc

SEQ ID NO: 6101434 - DNA, 20 bp, Homo sapien
cgttacatcagcttcacaga

SEQ ID NO: 6101435 - DNA, 20 bp, Homo sapien
tctgtgaagctgatgtaacg

SEQ ID NO: 6101436 - DNA, 20 bp, Homo sapien
cgtgtccatcgagctgcata

SEQ ID NO: 6101437 - DNA, 20 bp, Homo sapien
tatgcagctcgatggacacg

SEQ ID NO: 6101438 - DNA, 20 bp, Homo sapien
atgcgagcgagtcgaatcca

SEQ ID NO: 6101439 - DNA, 20 bp, Homo sapien
tggattcgactcgctcgcat

SEQ ID NO: 6101440 - DNA, 20 bp, Homo sapien
acaagcactgacacgcgatg

SEQ ID NO: 6101441 - DNA, 20 bp, Homo sapien
catcgcgtgtcagtgcttgt

SEQ ID NO: 6101442 - DNA, 20 bp, Homo sapien
gcccacaatgtctcgatagt

SEQ ID NO: 6101443 - DNA, 20 bp, Homo sapien
actatcgagacattgtgggc

SEQ ID NO: 6101444 - DNA, 20 bp, Homo sapien
gtcacacatgcttatgcttc

SEQ ID NO: 6101445 - DNA, 20 bp, Homo sapien
gaagcataagcatgtgtgac

SEQ ID NO: 6101446 - DNA, 20 bp, Homo sapien
tctgcgagttggtgctctca

SEQ ID NO: 6101447 - DNA, 20 bp, Homo sapien
tgagagcaccaactcgcaga

SEQ ID NO: 6101448 - DNA, 20 bp, Homo sapien
tatgtcagttgatgtagcgc

SEQ ID NO: 6101449 - DNA, 20 bp, Homo sapien
gcgctacatcaactgacata

SEQ ID NO: 6101450 - DNA, 20 bp, Homo sapien
gttgtatcaatgtgtgcgac

SEQ ID NO: 6101451 - DNA, 20 bp, Homo sapien
gtcgcacacattgatacaac

SEQ ID NO: 6101452 - DNA, 20 bp, Homo sapien
gttgtatagtattcgcgcag

SEQ ID NO: 6101453 - DNA, 20 bp, Homo sapien
ctgcgcgaatactatacaac

SEQ ID NO: 6101454 - DNA, 20 bp, Homo sapien
gagcagcatgtcgctagtca

SEQ ID NO: 6101455 - DNA, 20 bp, Homo sapien
tgactagcgacatgctgctc

SEQ ID NO: 6101456 - DNA, 20 bp, Homo sapien
gaactgtcgatgatggtcac

SEQ ID NO: 6101457 - DNA, 20 bp, Homo sapien
gtgaccatcatcgacagttc

SEQ ID NO: 6101458 - DNA, 20 bp, Homo sapien
cgtgtatagatcgctgtaga

SEQ ID NO: 6101459 - DNA, 20 bp, Homo sapien
tctacagcgatctatacacg

SEQ ID NO: 6101460 - DNA, 20 bp, Homo sapien
atgcgactcagtaggcttat

SEQ ID NO: 6101461 - DNA, 20 bp, Homo sapien
ataagcctactgagtcgcat

SEQ ID NO: 6101462 - DNA, 20 bp, Homo sapien
atgcgacctagtctgccagt

SEQ ID NO: 6101463 - DNA, 20 bp, Homo sapien
actggcagactaggtcgcat

SEQ ID NO: 6101464 - DNA, 20 bp, Homo sapien
aatgctcacatcgcaggtac

SEQ ID NO: 6101465 - DNA, 20 bp, Homo sapien
gtacctgcgatgtgagcatt

SEQ ID NO: 6101466 - DNA, 20 bp, Homo sapien
gatagcattatagtcaggcg

SEQ ID NO: 6101467 - DNA, 20 bp, Homo sapien
cgcctgactataatgctatc

SEQ ID NO: 6101468 - DNA, 20 bp, Homo sapien
tatgggtcttgctgatacgc

SEQ ID NO: 6101469 - DNA, 20 bp, Homo sapien
gcgtatcagcaagacccata

SEQ ID NO: 6101470 - DNA, 20 bp, Homo sapien
gttgatgtcatgtgtcgcac

SEQ ID NO: 6101471 - DNA, 20 bp, Homo sapien
gtgcgacacatgacatcaac

SEQ ID NO: 6101472 - DNA, 20 bp, Homo sapien
gaactaattcacgacatgcg

SEQ ID NO: 6101473 - DNA, 20 bp, Homo sapien
cgcatgtcgtgaattagttc

SEQ ID NO: 6101474 - DNA, 20 bp, Homo sapien
gaacgcagttatcagactct

SEQ ID NO: 6101475 - DNA, 20 bp, Homo sapien
agagtctgataactgcgttc

SEQ ID NO: 6101476 - DNA, 20 bp, Homo sapien
ccatgtaatacgatctctcg

SEQ ID NO: 6101477 - DNA, 20 bp, Homo sapien
cgagagatcgtattacatgg

SEQ ID NO: 6101478 - DNA, 20 bp, Homo sapien
atgccgcgtctctacaatag

SEQ ID NO: 6101479 - DNA, 20 bp, Homo sapien
ctattgtagagacgcggcat

SEQ ID NO: 6101480 - DNA, 20 bp, Homo sapien
gttcttgacaatgtgtagcg

SEQ ID NO: 6101481 - DNA, 20 bp, Homo sapien
cgctacacattgtcaagaac

SEQ ID NO: 6101482 - DNA, 20 bp, Homo sapien
gcgacctgtggtgacactat

SEQ ID NO: 6101483 - DNA, 20 bp, Homo sapien
atagtgtcaccacaggtcgc

SEQ ID NO: 6101484 - DNA, 20 bp, Homo sapien
gagattcataacctgtgcgt

SEQ ID NO: 6101485 - DNA, 20 bp, Homo sapien
acgcacaggttatgaatctc

SEQ ID NO: 6101486 - DNA, 20 bp, Homo sapien
cgtgccgctcgtgatagaat

SEQ ID NO: 6101487 - DNA, 20 bp, Homo sapien
attctatcacgagcggcacg

SEQ ID NO: 6101488 - DNA, 20 bp, Homo sapien
gatagcagttcactacctgg

SEQ ID NO: 6101489 - DNA, 20 bp, Homo sapien
ccaggtagtgaactgctatc

SEQ ID NO: 6101490 - DNA, 20 bp, Homo sapien
aatgacagatacgctaggct

SEQ ID NO: 6101491 - DNA, 20 bp, Homo sapien
agcctagcgtatctgtcatt

SEQ ID NO: 6101492 - DNA, 20 bp, Homo sapien
aatctgaggagcggccatct

SEQ ID NO: 6101493 - DNA, 20 bp, Homo sapien
agatggccgctcctcagatt

SEQ ID NO: 6101494 - DNA, 20 bp, Homo sapien
gttcaggattctgtcgatgc

SEQ ID NO: 6101495 - DNA, 20 bp, Homo sapien
gcatcgacagaatcctgaac

SEQ ID NO: 6101496 - DNA, 20 bp, Homo sapien
gagatagtggtcgctactct

SEQ ID NO: 6101497 - DNA, 20 bp, Homo sapien
agagtagcgaccactatctc

SEQ ID NO: 6101498 - DNA, 20 bp, Homo sapien
gaacactctgtgaggctgta

SEQ ID NO: 6101499 - DNA, 20 bp, Homo sapien
tacagcctcacagagtgttc

SEQ ID NO: 6101500 - DNA, 20 bp, Homo sapien
atgcagcgtaggtatcgact

SEQ ID NO: 6101501 - DNA, 20 bp, Homo sapien
agtcgatacctacgctgcat

SEQ ID NO: 6101502 - DNA, 20 bp, Homo sapien
agctgcatcctagcgtcatg

SEQ ID NO: 6101503 - DNA, 20 bp, Homo sapien
catgacgctaggatgcagct

SEQ ID NO: 6101504 - DNA, 20 bp, Homo sapien
aatcgagatagcgtcaggct

SEQ ID NO: 6101505 - DNA, 20 bp, Homo sapien
agcctgacgctatctcgatt

SEQ ID NO: 6101506 - DNA, 20 bp, Homo sapien
aatccagctaactatcagcg

SEQ ID NO: 6101507 - DNA, 20 bp, Homo sapien
cgctgatagttagctggatt

SEQ ID NO: 6101508 - DNA, 20 bp, Homo sapien
gttacgcttgagtgatctgc

SEQ ID NO: 6101509 - DNA, 20 bp, Homo sapien
gcagatcactcaagcgtaac

SEQ ID NO: 6101510 - DNA, 20 bp, Homo sapien
gacgcctatggtatctgttg

SEQ ID NO: 6101511 - DNA, 20 bp, Homo sapien
caacagataccataggcgtc

SEQ ID NO: 6101512 - DNA, 20 bp, Homo sapien
gatgaatgtcgtcgctgctc

SEQ ID NO: 6101513 - DNA, 20 bp, Homo sapien
gagcagcgacgacattcatc

SEQ ID NO: 6101514 - DNA, 20 bp, Homo sapien
gagaggccgtcgctatacat

SEQ ID NO: 6101515 - DNA, 20 bp, Homo sapien
atgtatagcgacggcctctc

SEQ ID NO: 6101516 - DNA, 20 bp, Homo sapien
cagaggatggcactcgtcat

SEQ ID NO: 6101517 - DNA, 20 bp, Homo sapien
atgacgagtgccatcctctg

SEQ ID NO: 6101518 - DNA, 20 bp, Homo sapien
atgcactctactactagcga

SEQ ID NO: 6101519 - DNA, 20 bp, Homo sapien
tcgctagtagtagagtgcat

SEQ ID NO: 6101520 - DNA, 20 bp, Homo sapien
agctatcggatgcacggcaa

SEQ ID NO: 6101521 - DNA, 20 bp, Homo sapien
ttgccgtgcatccgatagct

SEQ ID NO: 6101522 - DNA, 20 bp, Homo sapien
aatcagctcagatactcggg

SEQ ID NO: 6101523 - DNA, 20 bp, Homo sapien
cccgagtatctgagctgatt

SEQ ID NO: 6101524 - DNA, 20 bp, Homo sapien
aatcacgtcataatcagcgc

SEQ ID NO: 6101525 - DNA, 20 bp, Homo sapien
gcgctgattatgacgtgatt

SEQ ID NO: 6101526 - DNA, 20 bp, Homo sapien
tagctgggttcttatcgagc

SEQ ID NO: 6101527 - DNA, 20 bp, Homo sapien
gctcgataagaacccagcta

SEQ ID NO: 6101528 - DNA, 20 bp, Homo sapien
taagactgtgttagtagcgc

SEQ ID NO: 6101529 - DNA, 20 bp, Homo sapien
gcgctactaacacagtctta

SEQ ID NO: 6101530 - DNA, 20 bp, Homo sapien
gtttgtgcttctcggacagc

SEQ ID NO: 6101531 - DNA, 20 bp, Homo sapien
gctgtccgagaagcacaaac

SEQ ID NO: 6101532 - DNA, 20 bp, Homo sapien
gacgcagttcacacatctta

SEQ ID NO: 6101533 - DNA, 20 bp, Homo sapien
taagatgtgtgaactgcgtc

SEQ ID NO: 6101534 - DNA, 20 bp, Homo sapien
gttctgtcttatgagaggcc

SEQ ID NO: 6101535 - DNA, 20 bp, Homo sapien
ggcctctcataagacagaac

SEQ ID NO: 6101536 - DNA, 20 bp, Homo sapien
gttacgaattatggctgtgc

SEQ ID NO: 6101537 - DNA, 20 bp, Homo sapien
gcacagccataattcgtaac

SEQ ID NO: 6101538 - DNA, 20 bp, Homo sapien
gtgttatgttatccgagcgc

SEQ ID NO: 6101539 - DNA, 20 bp, Homo sapien
gcgctcggataacataacac

SEQ ID NO: 6101540 - DNA, 20 bp, Homo sapien
gtgggctattctcgtatgcc

SEQ ID NO: 6101541 - DNA, 20 bp, Homo sapien
ggcatacgagaatagcccac

SEQ ID NO: 6101542 - DNA, 20 bp, Homo sapien
gtggctcgttctgactgtac

SEQ ID NO: 6101543 - DNA, 20 bp, Homo sapien
gtacagtcagaacgagccac

SEQ ID NO: 6101544 - DNA, 20 bp, Homo sapien
gtgccttattatgtaggagc

SEQ ID NO: 6101545 - DNA, 20 bp, Homo sapien
gctcctacataataaggcac

SEQ ID NO: 6101546 - DNA, 20 bp, Homo sapien
gtgaggtcttcgtgctatcc

SEQ ID NO: 6101547 - DNA, 20 bp, Homo sapien
ggatagcacgaagacctcac

SEQ ID NO: 6101548 - DNA, 20 bp, Homo sapien
gtatcagattcggtgtagtc

SEQ ID NO: 6101549 - DNA, 20 bp, Homo sapien
gactacaccgaatctgatac

SEQ ID NO: 6101550 - DNA, 20 bp, Homo sapien
gtatatggttcgatagtcgc

SEQ ID NO: 6101551 - DNA, 20 bp, Homo sapien
gcgactatcgaaccatatac

SEQ ID NO: 6101552 - DNA, 20 bp, Homo sapien
gtaccgcatggttatggatc

SEQ ID NO: 6101553 - DNA, 20 bp, Homo sapien
gatccataaccatgcggtac

SEQ ID NO: 6101554 - DNA, 20 bp, Homo sapien
ctgtcagattagtgagcatg

SEQ ID NO: 6101555 - DNA, 20 bp, Homo sapien
catgctcactaatctgacag

SEQ ID NO: 6101556 - DNA, 20 bp, Homo sapien
ggtcgtgattcgcgtctatc

SEQ ID NO: 6101557 - DNA, 20 bp, Homo sapien
gatagacgcgaatcacgacc

SEQ ID NO: 6101558 - DNA, 20 bp, Homo sapien
gctctcattagttagtaggc

SEQ ID NO: 6101559 - DNA, 20 bp, Homo sapien
gcctactaactaatgagagc

SEQ ID NO: 6101560 - DNA, 20 bp, Homo sapien
gcggtcaattacgtgctgtc

SEQ ID NO: 6101561 - DNA, 20 bp, Homo sapien
gacagcacgtaattgaccgc

SEQ ID NO: 6101562 - DNA, 20 bp, Homo sapien
gcgactaggtggctctaatc

SEQ ID NO: 6101563 - DNA, 20 bp, Homo sapien
gattagagccacctagtcgc

SEQ ID NO: 6101564 - DNA, 20 bp, Homo sapien
gcctacagttcgagagtgtc

SEQ ID NO: 6101565 - DNA, 20 bp, Homo sapien
gacactctcgaactgtaggc

SEQ ID NO: 6101566 - DNA, 20 bp, Homo sapien
gccctagatgtcgtagtatc

SEQ ID NO: 6101567 - DNA, 20 bp, Homo sapien
gatactacgacatctagggc

SEQ ID NO: 6101568 - DNA, 20 bp, Homo sapien
gcaagaaattactcgctgtc

SEQ ID NO: 6101569 - DNA, 20 bp, Homo sapien
gacagcgagtaatttcttgc

SEQ ID NO: 6101570 - DNA, 20 bp, Homo sapien
gagttatctaatatccgcgc

SEQ ID NO: 6101571 - DNA, 20 bp, Homo sapien
gcgcggatattagataactc

SEQ ID NO: 6101572 - DNA, 20 bp, Homo sapien
gaggtcagttcacgaagctc

SEQ ID NO: 6101573 - DNA, 20 bp, Homo sapien
gagcttcgtgaactgacctc

SEQ ID NO: 6101574 - DNA, 20 bp, Homo sapien
gaatcaagttacgtgcgtgc

SEQ ID NO: 6101575 - DNA, 20 bp, Homo sapien
gcacgcacgtaacttgattc

SEQ ID NO: 6101576 - DNA, 20 bp, Homo sapien
ctgtcaactgtactgtcatc

SEQ ID NO: 6101577 - DNA, 20 bp, Homo sapien
gatgacagtacagttgacag

SEQ ID NO: 6101578 - DNA, 20 bp, Homo sapien
gaatagtgtcgtaggctctc

SEQ ID NO: 6101579 - DNA, 20 bp, Homo sapien
gagagcctacgacactattc

SEQ ID NO: 6101580 - DNA, 20 bp, Homo sapien
gaagacagttatacccatgc

SEQ ID NO: 6101581 - DNA, 20 bp, Homo sapien
gcatgggtataactgtcttc

SEQ ID NO: 6101582 - DNA, 20 bp, Homo sapien
cttatggtcaatgtgaggtc

SEQ ID NO: 6101583 - DNA, 20 bp, Homo sapien
gacctcacattgaccataag

SEQ ID NO: 6101584 - DNA, 20 bp, Homo sapien
ctctgcgttacacttaatgc

SEQ ID NO: 6101585 - DNA, 20 bp, Homo sapien
gcattaagtgtaacgcagag

SEQ ID NO: 6101586 - DNA, 20 bp, Homo sapien
ctatgtactactatcgtcgc

SEQ ID NO: 6101587 - DNA, 20 bp, Homo sapien
gcgacgatagtagtacatag

SEQ ID NO: 6101588 - DNA, 20 bp, Homo sapien
ctaatgactggtcgtagctc

SEQ ID NO: 6101589 - DNA, 20 bp, Homo sapien
gagctacgaccagtcattag

SEQ ID NO: 6101590 - DNA, 20 bp, Homo sapien
cgtgaccattaagtcgatgc

SEQ ID NO: 6101591 - DNA, 20 bp, Homo sapien
gcatcgacttaatggtcacg

SEQ ID NO: 6101592 - DNA, 20 bp, Homo sapien
cgcacgcttaatacatagtc

SEQ ID NO: 6101593 - DNA, 20 bp, Homo sapien
gactatgtattaagcgtgcg

SEQ ID NO: 6101594 - DNA, 20 bp, Homo sapien
cgactgattaacgatctgtc

SEQ ID NO: 6101595 - DNA, 20 bp, Homo sapien
gacagatcgttaatcagtcg

SEQ ID NO: 6101596 - DNA, 20 bp, Homo sapien
ccacagattaacatacgtgc

SEQ ID NO: 6101597 - DNA, 20 bp, Homo sapien
gcacgtatgttaatctgtgg

SEQ ID NO: 6101598 - DNA, 20 bp, Homo sapien
cggccatatcgagctatacg

SEQ ID NO: 6101599 - DNA, 20 bp, Homo sapien
cgtatagctcgatatggccg

SEQ ID NO: 6101600 - DNA, 20 bp, Homo sapien
cattgaacaaactgtcacgc

SEQ ID NO: 6101601 - DNA, 20 bp, Homo sapien
gcgtgacagtttgttcaatg

SEQ ID NO: 6101602 - DNA, 20 bp, Homo sapien
catagtaatcgaggcgtctc

SEQ ID NO: 6101603 - DNA, 20 bp, Homo sapien
gagacgcctcgattactatg

SEQ ID NO: 6101604 - DNA, 20 bp, Homo sapien
catacgaatctatacgtcgc

SEQ ID NO: 6101605 - DNA, 20 bp, Homo sapien
gcgacgtatagattcgtatg

SEQ ID NO: 6101606 - DNA, 20 bp, Homo sapien
cagcgacgtatcgtagagtc

SEQ ID NO: 6101607 - DNA, 20 bp, Homo sapien
gactctacgatacgtcgctg

SEQ ID NO: 6101608 - DNA, 20 bp, Homo sapien
atttatagcatatccgccgc

SEQ ID NO: 6101609 - DNA, 20 bp, Homo sapien
gcggcggatatgctataaat

SEQ ID NO: 6101610 - DNA, 20 bp, Homo sapien
atcctgtgaagcggtgatac

SEQ ID NO: 6101611 - DNA, 20 bp, Homo sapien
gtatcaccgcttcacaggat

SEQ ID NO: 6101612 - DNA, 20 bp, Homo sapien
atatgtacgaagctagtggc

SEQ ID NO: 6101613 - DNA, 20 bp, Homo sapien
gccactagcttcgtacatat

SEQ ID NO: 6101614 - DNA, 20 bp, Homo sapien
ataaatatgacgctcgctcc

SEQ ID NO: 6101615 - DNA, 20 bp, Homo sapien
ggagcgagcgtcatatttat

SEQ ID NO: 6101616 - DNA, 20 bp, Homo sapien
agtggtcggtctgacacatc

SEQ ID NO: 6101617 - DNA, 20 bp, Homo sapien
gatgtgtcagaccgaccact

SEQ ID NO: 6101618 - DNA, 20 bp, Homo sapien
aggtcgcatggacgaacatc

SEQ ID NO: 6101619 - DNA, 20 bp, Homo sapien
gatgttcgtccatgcgacct

SEQ ID NO: 6101620 - DNA, 20 bp, Homo sapien
cggcatagtgctgcgatcta

SEQ ID NO: 6101621 - DNA, 20 bp, Homo sapien
tagatcgcagcactatgccg

SEQ ID NO: 6101622 - DNA, 20 bp, Homo sapien
agctattagaaacatcgcgc

SEQ ID NO: 6101623 - DNA, 20 bp, Homo sapien
gcgcgatgtttctaatagct

SEQ ID NO: 6101624 - DNA, 20 bp, Homo sapien
acatcctggacacgagtgac

SEQ ID NO: 6101625 - DNA, 20 bp, Homo sapien
gtcactcgtgtccaggatgt

SEQ ID NO: 6101626 - DNA, 20 bp, Homo sapien
acatatcctaatacaggcgc

SEQ ID NO: 6101627 - DNA, 20 bp, Homo sapien
gcgcctgtattaggatatgt

SEQ ID NO: 6101628 - DNA, 20 bp, Homo sapien
acatagctgactacaaggtc

SEQ ID NO: 6101629 - DNA, 20 bp, Homo sapien
gaccttgtagtcagctatgt

SEQ ID NO: 6101630 - DNA, 20 bp, Homo sapien
acacgagatccagtaggctc

SEQ ID NO: 6101631 - DNA, 20 bp, Homo sapien
gagcctactggatctcgtgt

SEQ ID NO: 6101632 - DNA, 20 bp, Homo sapien
acaactgtgaacgcatggcc

SEQ ID NO: 6101633 - DNA, 20 bp, Homo sapien
ggccatgcgttcacagttgt

SEQ ID NO: 6101634 - DNA, 20 bp, Homo sapien
aatctcagaatccgtacagc

SEQ ID NO: 6101635 - DNA, 20 bp, Homo sapien
gctgtacggattctgagatt

SEQ ID NO: 6101636 - DNA, 20 bp, Homo sapien
aatagacgtactcatccagc

SEQ ID NO: 6101637 - DNA, 20 bp, Homo sapien
gctggatgagtacgtctatt

SEQ ID NO: 6101638 - DNA, 20 bp, Homo sapien
aagtacatgacaccgatggc

SEQ ID NO: 6101639 - DNA, 20 bp, Homo sapien
gccatcggtgtcatgtactt

SEQ ID NO: 6101640 - DNA, 20 bp, Homo sapien
aaggtacatagctcgcagtc

SEQ ID NO: 6101641 - DNA, 20 bp, Homo sapien
gactgcgagctatgtacctt

SEQ ID NO: 6101642 - DNA, 20 bp, Homo sapien
cacggctctgaggtgacaat

SEQ ID NO: 6101643 - DNA, 20 bp, Homo sapien
attgtcacctcagagccgtg

SEQ ID NO: 6101644 - DNA, 20 bp, Homo sapien
aacatcaatcgagacgtgcc

SEQ ID NO: 6101645 - DNA, 20 bp, Homo sapien
ggcacgtctcgattgatgtt

SEQ ID NO: 6101646 - DNA, 20 bp, Homo sapien
tttattgattggcggacgca

SEQ ID NO: 6101647 - DNA, 20 bp, Homo sapien
tgcgtccgccaatcaataaa

SEQ ID NO: 6101648 - DNA, 20 bp, Homo sapien
tgtaccgctttcgtggtgca

SEQ ID NO: 6101649 - DNA, 20 bp, Homo sapien
tgcaccacgaaagcggtaca

SEQ ID NO: 6101650 - DNA, 20 bp, Homo sapien
tgccctattgttgcgtcgga

SEQ ID NO: 6101651 - DNA, 20 bp, Homo sapien
tccgacgcaacaatagggca

SEQ ID NO: 6101652 - DNA, 20 bp, Homo sapien
tctgtgcgttcttcgaccga

SEQ ID NO: 6101653 - DNA, 20 bp, Homo sapien
tcggtcgaagaacgcacaga

SEQ ID NO: 6101654 - DNA, 20 bp, Homo sapien
tctcgcgttgtggtgtaaca

SEQ ID NO: 6101655 - DNA, 20 bp, Homo sapien
tgttacaccacaacgcgaga

SEQ ID NO: 6101656 - DNA, 20 bp, Homo sapien
tctcaacttgtcgtatggga

SEQ ID NO: 6101657 - DNA, 20 bp, Homo sapien
tcccatacgacaagttgaga

SEQ ID NO: 6101658 - DNA, 20 bp, Homo sapien
tcgtgccttgtcattcggga

SEQ ID NO: 6101659 - DNA, 20 bp, Homo sapien
tcccgaatgacaaggcacga

SEQ ID NO: 6101660 - DNA, 20 bp, Homo sapien
tcccggtctgttatgtggca

SEQ ID NO: 6101661 - DNA, 20 bp, Homo sapien
tgccacataacagaccggga

SEQ ID NO: 6101662 - DNA, 20 bp, Homo sapien
tagggtgcttgctacttaga

SEQ ID NO: 6101663 - DNA, 20 bp, Homo sapien
tctaagtagcaagcacccta

SEQ ID NO: 6101664 - DNA, 20 bp, Homo sapien
atctggatcaacgtcgcgct

SEQ ID NO: 6101665 - DNA, 20 bp, Homo sapien
agcgcgacgttgatccagat

SEQ ID NO: 6101666 - DNA, 20 bp, Homo sapien
gcagagcgttcagcgcatat

SEQ ID NO: 6101667 - DNA, 20 bp, Homo sapien
atatgcgctgaacgctctgc

SEQ ID NO: 6101668 - DNA, 20 bp, Homo sapien
gtgttcgctggtcttcgcaa

SEQ ID NO: 6101669 - DNA, 20 bp, Homo sapien
ttgcgaagaccagcgaacac

SEQ ID NO: 6101670 - DNA, 20 bp, Homo sapien
gtgtccgattctgtcctcga

SEQ ID NO: 6101671 - DNA, 20 bp, Homo sapien
tcgaggacagaatcggacac

SEQ ID NO: 6101672 - DNA, 20 bp, Homo sapien
gtggccggttcttcatgtca

SEQ ID NO: 6101673 - DNA, 20 bp, Homo sapien
tgacatgaagaaccggccac

SEQ ID NO: 6101674 - DNA, 20 bp, Homo sapien
gtgcggtatggttcctctca

SEQ ID NO: 6101675 - DNA, 20 bp, Homo sapien
tgagaggaaccataccgcac

SEQ ID NO: 6101676 - DNA, 20 bp, Homo sapien
gtgcctcgttctcgtgtaga

SEQ ID NO: 6101677 - DNA, 20 bp, Homo sapien
tctacacgagaacgaggcac

SEQ ID NO: 6101678 - DNA, 20 bp, Homo sapien
gtctagtcttcgtcctgcga

SEQ ID NO: 6101679 - DNA, 20 bp, Homo sapien
tcgcaggacgaagactagac

SEQ ID NO: 6101680 - DNA, 20 bp, Homo sapien
gtcgttgcacctagttgata

SEQ ID NO: 6101681 - DNA, 20 bp, Homo sapien
tatcaactaggtgcaacgac

SEQ ID NO: 6101682 - DNA, 20 bp, Homo sapien
gtcgtggcttcgtcttcaga

SEQ ID NO: 6101683 - DNA, 20 bp, Homo sapien
tctgaagacgaagccacgac

SEQ ID NO: 6101684 - DNA, 20 bp, Homo sapien
gtccgtggttcatcgtgtca

SEQ ID NO: 6101685 - DNA, 20 bp, Homo sapien
tgacacgatgaaccacggac

SEQ ID NO: 6101686 - DNA, 20 bp, Homo sapien
gtccagttcgtgtatggtca

SEQ ID NO: 6101687 - DNA, 20 bp, Homo sapien
tgaccatacacgaactggac

SEQ ID NO: 6101688 - DNA, 20 bp, Homo sapien
agcagtcgtaggacgctcat

SEQ ID NO: 6101689 - DNA, 20 bp, Homo sapien
atgagcgtcctacgactgct

SEQ ID NO: 6101690 - DNA, 20 bp, Homo sapien
ggtaagccttcgctgagcta

SEQ ID NO: 6101691 - DNA, 20 bp, Homo sapien
tagctcagcgaaggcttacc

SEQ ID NO: 6101692 - DNA, 20 bp, Homo sapien
gctacgcggtgagttccata

SEQ ID NO: 6101693 - DNA, 20 bp, Homo sapien
tatggaactcaccgcgtagc

SEQ ID NO: 6101694 - DNA, 20 bp, Homo sapien
gcggctaattcgacgctgta

SEQ ID NO: 6101695 - DNA, 20 bp, Homo sapien
tacagcgtcgaattagccgc

SEQ ID NO: 6101696 - DNA, 20 bp, Homo sapien
gcgaggcttcgacgctatta

SEQ ID NO: 6101697 - DNA, 20 bp, Homo sapien
taatagcgtcgaagcctcgc

SEQ ID NO: 6101698 - DNA, 20 bp, Homo sapien
gcgaaccctgttagcgcata

SEQ ID NO: 6101699 - DNA, 20 bp, Homo sapien
tatgcgctaacagggttcgc

SEQ ID NO: 6101700 - DNA, 20 bp, Homo sapien
gccctgtattaactgtgtca

SEQ ID NO: 6101701 - DNA, 20 bp, Homo sapien
tgacacagttaatacagggc

SEQ ID NO: 6101702 - DNA, 20 bp, Homo sapien
gcccgcgcttcataagtgta

SEQ ID NO: 6101703 - DNA, 20 bp, Homo sapien
tacacttatgaagcgcgggc

SEQ ID NO: 6101704 - DNA, 20 bp, Homo sapien
gccacctctggtctaatata

SEQ ID NO: 6101705 - DNA, 20 bp, Homo sapien
tatattagaccagaggtggc

SEQ ID NO: 6101706 - DNA, 20 bp, Homo sapien
gcatcgggttcacggctata

SEQ ID NO: 6101707 - DNA, 20 bp, Homo sapien
tatagccgtgaacccgatgc

SEQ ID NO: 6101708 - DNA, 20 bp, Homo sapien
gcagcggttatactagctta

SEQ ID NO: 6101709 - DNA, 20 bp, Homo sapien
taagctagtataaccgctgc

SEQ ID NO: 6101710 - DNA, 20 bp, Homo sapien
aagagcatcgacgcggatca

SEQ ID NO: 6101711 - DNA, 20 bp, Homo sapien
tgatccgcgtcgatgctctt

SEQ ID NO: 6101712 - DNA, 20 bp, Homo sapien
gcactaactggtctgggtca

SEQ ID NO: 6101713 - DNA, 20 bp, Homo sapien
tgacccagaccagttagtgc

SEQ ID NO: 6101714 - DNA, 20 bp, Homo sapien
gcacggtgtggaacctcata

SEQ ID NO: 6101715 - DNA, 20 bp, Homo sapien
tatgaggttccacaccgtgc

SEQ ID NO: 6101716 - DNA, 20 bp, Homo sapien
gagactcctgtcggcttaga

SEQ ID NO: 6101717 - DNA, 20 bp, Homo sapien
tctaagccgacaggagtctc

SEQ ID NO: 6101718 - DNA, 20 bp, Homo sapien
gacgcaacttcaccgaatga

SEQ ID NO: 6101719 - DNA, 20 bp, Homo sapien
tcattcggtgaagttgcgtc

SEQ ID NO: 6101720 - DNA, 20 bp, Homo sapien
gaagtctgtcctcctctata

SEQ ID NO: 6101721 - DNA, 20 bp, Homo sapien
tatagaggaggacagacttc

SEQ ID NO: 6101722 - DNA, 20 bp, Homo sapien
gaacactgtagtcggtgcta

SEQ ID NO: 6101723 - DNA, 20 bp, Homo sapien
tagcaccgactacagtgttc

SEQ ID NO: 6101724 - DNA, 20 bp, Homo sapien
ctgcgtaatggtgaccgcta

SEQ ID NO: 6101725 - DNA, 20 bp, Homo sapien
tagcggtcaccattacgcag

SEQ ID NO: 6101726 - DNA, 20 bp, Homo sapien
ctgccgtcttacgtcatata

SEQ ID NO: 6101727 - DNA, 20 bp, Homo sapien
tatatgacgtaagacggcag

SEQ ID NO: 6101728 - DNA, 20 bp, Homo sapien
ctcggttagactgatggtca

SEQ ID NO: 6101729 - DNA, 20 bp, Homo sapien
tgaccatcagtctaaccgag

SEQ ID NO: 6101730 - DNA, 20 bp, Homo sapien
ctccgcactggtcaggtata

SEQ ID NO: 6101731 - DNA, 20 bp, Homo sapien
tatacctgaccagtgcggag

SEQ ID NO: 6101732 - DNA, 20 bp, Homo sapien
aagagatatagcacgcgcct

SEQ ID NO: 6101733 - DNA, 20 bp, Homo sapien
aggcgcgtgctatatctctt

SEQ ID NO: 6101734 - DNA, 20 bp, Homo sapien
ctagcccgttagacgcatga

SEQ ID NO: 6101735 - DNA, 20 bp, Homo sapien
tcatgcgtctaacgggctag

SEQ ID NO: 6101736 - DNA, 20 bp, Homo sapien
cgtgtagctcgtgtacgtca

SEQ ID NO: 6101737 - DNA, 20 bp, Homo sapien
tgacgtacacgagctacacg

SEQ ID NO: 6101738 - DNA, 20 bp, Homo sapien
cgtgctggtcgagaatccta

SEQ ID NO: 6101739 - DNA, 20 bp, Homo sapien
taggattctcgaccagcacg

SEQ ID NO: 6101740 - DNA, 20 bp, Homo sapien
cgtgcgcctggtagcaaata

SEQ ID NO: 6101741 - DNA, 20 bp, Homo sapien
tatttgctaccaggcgcacg

SEQ ID NO: 6101742 - DNA, 20 bp, Homo sapien
cgtgcaagttaccgagctga

SEQ ID NO: 6101743 - DNA, 20 bp, Homo sapien
tcagctcggtaacttgcacg

SEQ ID NO: 6101744 - DNA, 20 bp, Homo sapien
cgtcgtcgtgtgactagcaa

SEQ ID NO: 6101745 - DNA, 20 bp, Homo sapien
ttgctagtcacacgacgacg

SEQ ID NO: 6101746 - DNA, 20 bp, Homo sapien
cgtatgtaacctgctctcga

SEQ ID NO: 6101747 - DNA, 20 bp, Homo sapien
tcgagagcaggttacatacg

SEQ ID NO: 6101748 - DNA, 20 bp, Homo sapien
cggtgatctggtagccacta

SEQ ID NO: 6101749 - DNA, 20 bp, Homo sapien
tagtggctaccagatcaccg

SEQ ID NO: 6101750 - DNA, 20 bp, Homo sapien
cgcgggccttacagcatata

SEQ ID NO: 6101751 - DNA, 20 bp, Homo sapien
tatatgctgtaaggcccgcg

SEQ ID NO: 6101752 - DNA, 20 bp, Homo sapien
cgcggacttaacatcgtgca

SEQ ID NO: 6101753 - DNA, 20 bp, Homo sapien
tgcacgatgttaagtccgcg

SEQ ID NO: 6101754 - DNA, 20 bp, Homo sapien
tgctctcatttatacgacgg

SEQ ID NO: 6101755 - DNA, 20 bp, Homo sapien
ccgtcgtataaatgagagca

SEQ ID NO: 6101756 - DNA, 20 bp, Homo sapien
cgcagcagttacaacggtga

SEQ ID NO: 6101757 - DNA, 20 bp, Homo sapien
tcaccgttgtaactgctgcg

SEQ ID NO: 6101758 - DNA, 20 bp, Homo sapien
cgagtgctccgtgcgaaata

SEQ ID NO: 6101759 - DNA, 20 bp, Homo sapien
tatttcgcacggagcactcg

SEQ ID NO: 6101760 - DNA, 20 bp, Homo sapien
cgagtaactgtgacgcgata

SEQ ID NO: 6101761 - DNA, 20 bp, Homo sapien
tatcgcgtcacagttactcg

SEQ ID NO: 6101762 - DNA, 20 bp, Homo sapien
cctgcgagtggtcacgaata

SEQ ID NO: 6101763 - DNA, 20 bp, Homo sapien
tattcgtgaccactcgcagg

SEQ ID NO: 6101764 - DNA, 20 bp, Homo sapien
cctactgctccagagtggta

SEQ ID NO: 6101765 - DNA, 20 bp, Homo sapien
taccactctggagcagtagg

SEQ ID NO: 6101766 - DNA, 20 bp, Homo sapien
ccgtcgtatgagtgctagta

SEQ ID NO: 6101767 - DNA, 20 bp, Homo sapien
tactagcactcatacgacgg

SEQ ID NO: 6101768 - DNA, 20 bp, Homo sapien
ccgcgcagtgtactatgtaa

SEQ ID NO: 6101769 - DNA, 20 bp, Homo sapien
ttacatagtacactgcgcgg

SEQ ID NO: 6101770 - DNA, 20 bp, Homo sapien
ccgcactctcgtaatataga

SEQ ID NO: 6101771 - DNA, 20 bp, Homo sapien
tctatattacgagagtgcgg

SEQ ID NO: 6101772 - DNA, 20 bp, Homo sapien
ccgcaagctcgtcagtagaa

SEQ ID NO: 6101773 - DNA, 20 bp, Homo sapien
ttctactgacgagcttgcgg

SEQ ID NO: 6101774 - DNA, 20 bp, Homo sapien
ccctagagtctgctacgaga

SEQ ID NO: 6101775 - DNA, 20 bp, Homo sapien
tctcgtagcagactctaggg

SEQ ID NO: 6101776 - DNA, 20 bp, Homo sapien
tcgcgtcatttatcgaatcg

SEQ ID NO: 6101777 - DNA, 20 bp, Homo sapien
cgattcgataaatgacgcga

SEQ ID NO: 6101778 - DNA, 20 bp, Homo sapien
ccagctcgtactatcgaata

SEQ ID NO: 6101779 - DNA, 20 bp, Homo sapien
tattcgatagtacgagctgg

SEQ ID NO: 6101780 - DNA, 20 bp, Homo sapien
ccactggctaccgatgagta

SEQ ID NO: 6101781 - DNA, 20 bp, Homo sapien
tactcatcggtagccagtgg

SEQ ID NO: 6101782 - DNA, 20 bp, Homo sapien
ccacgcggtacatgagtcaa

SEQ ID NO: 6101783 - DNA, 20 bp, Homo sapien
ttgactcatgtaccgcgtgg

SEQ ID NO: 6101784 - DNA, 20 bp, Homo sapien
catgcgagtcgtgaccgtaa

SEQ ID NO: 6101785 - DNA, 20 bp, Homo sapien
ttacggtcacgactcgcatg

SEQ ID NO: 6101786 - DNA, 20 bp, Homo sapien
catatccgtcgtgccgagta

SEQ ID NO: 6101787 - DNA, 20 bp, Homo sapien
tactcggcacgacggatatg

SEQ ID NO: 6101788 - DNA, 20 bp, Homo sapien
cagtctcctagctcggtgaa

SEQ ID NO: 6101789 - DNA, 20 bp, Homo sapien
ttcaccgagctaggagactg

SEQ ID NO: 6101790 - DNA, 20 bp, Homo sapien
cagtacgctcgtcgtcagaa

SEQ ID NO: 6101791 - DNA, 20 bp, Homo sapien
ttctgacgacgagcgtactg

SEQ ID NO: 6101792 - DNA, 20 bp, Homo sapien
cagcggcgtgtaagccaata

SEQ ID NO: 6101793 - DNA, 20 bp, Homo sapien
tattggcttacacgccgctg

SEQ ID NO: 6101794 - DNA, 20 bp, Homo sapien
cagcgagtgctacgcctaaa

SEQ ID NO: 6101795 - DNA, 20 bp, Homo sapien
tttaggcgtagcactcgctg

SEQ ID NO: 6101796 - DNA, 20 bp, Homo sapien
caccatcgtcgtatcgaata

SEQ ID NO: 6101797 - DNA, 20 bp, Homo sapien
tattcgatacgacgatggtg

SEQ ID NO: 6101798 - DNA, 20 bp, Homo sapien
tcgcgcactttacgtgtatg

SEQ ID NO: 6101799 - DNA, 20 bp, Homo sapien
catacacgtaaagtgcgcga

SEQ ID NO: 6101800 - DNA, 20 bp, Homo sapien
caactctggacgtgcgctaa

SEQ ID NO: 6101801 - DNA, 20 bp, Homo sapien
ttagcgcacgtccagagttg

SEQ ID NO: 6101802 - DNA, 20 bp, Homo sapien
caaacgactggagcgtcaga

SEQ ID NO: 6101803 - DNA, 20 bp, Homo sapien
tctgacgctccagtcgtttg

SEQ ID NO: 6101804 - DNA, 20 bp, Homo sapien
attggcacacgtctagccta

SEQ ID NO: 6101805 - DNA, 20 bp, Homo sapien
taggctagacgtgtgccaat

SEQ ID NO: 6101806 - DNA, 20 bp, Homo sapien
attcacctgactcgcgtata

SEQ ID NO: 6101807 - DNA, 20 bp, Homo sapien
tatacgcgagtcaggtgaat

SEQ ID NO: 6101808 - DNA, 20 bp, Homo sapien
atggcgtgacgtacagtcca

SEQ ID NO: 6101809 - DNA, 20 bp, Homo sapien
tggactgtacgtcacgccat

SEQ ID NO: 6101810 - DNA, 20 bp, Homo sapien
atgccgctgactctacggta

SEQ ID NO: 6101811 - DNA, 20 bp, Homo sapien
taccgtagagtcagcggcat

SEQ ID NO: 6101812 - DNA, 20 bp, Homo sapien
atgactatcgtaccctgcaa

SEQ ID NO: 6101813 - DNA, 20 bp, Homo sapien
ttgcagggtacgatagtcat

SEQ ID NO: 6101814 - DNA, 20 bp, Homo sapien
atcgcacctcgtaggagtca

SEQ ID NO: 6101815 - DNA, 20 bp, Homo sapien
tgactcctacgaggtgcgat

SEQ ID NO: 6101816 - DNA, 20 bp, Homo sapien
atagtatctacgcctgccta

SEQ ID NO: 6101817 - DNA, 20 bp, Homo sapien
taggcaggcgtagatactat

SEQ ID NO: 6101818 - DNA, 20 bp, Homo sapien
atagactagcctgccggtca

SEQ ID NO: 6101819 - DNA, 20 bp, Homo sapien
tgaccggcaggctagtctat

SEQ ID NO: 6101820 - DNA, 20 bp, Homo sapien
tatagcaattcggtatgcgg

SEQ ID NO: 6101821 - DNA, 20 bp, Homo sapien
ccgcataccgaattgctata

SEQ ID NO: 6101822 - DNA, 20 bp, Homo sapien
agtccgggtgcatcgcaata

SEQ ID NO: 6101823 - DNA, 20 bp, Homo sapien
tattgcgatgcacccggact

SEQ ID NO: 6101824 - DNA, 20 bp, Homo sapien
agtccgaatagctcgcgcaa

SEQ ID NO: 6101825 - DNA, 20 bp, Homo sapien
ttgcgcgagctattcggact

SEQ ID NO: 6101826 - DNA, 20 bp, Homo sapien
agtatgagtacacgtcgaga

SEQ ID NO: 6101827 - DNA, 20 bp, Homo sapien
tctcgacgtgtactcatact

SEQ ID NO: 6101828 - DNA, 20 bp, Homo sapien
agtagctctagccggtgaca

SEQ ID NO: 6101829 - DNA, 20 bp, Homo sapien
tgtcaccggctagagctact

SEQ ID NO: 6101830 - DNA, 20 bp, Homo sapien
agcgcgtcaatcgggataca

SEQ ID NO: 6101831 - DNA, 20 bp, Homo sapien
tgtatcccgattgacgcgct

SEQ ID NO: 6101832 - DNA, 20 bp, Homo sapien
agcatatagggtacgctaga

SEQ ID NO: 6101833 - DNA, 20 bp, Homo sapien
tctagcgtaccctatatgct

SEQ ID NO: 6101834 - DNA, 20 bp, Homo sapien
acgtgatctaccctagctga

SEQ ID NO: 6101835 - DNA, 20 bp, Homo sapien
tcagctagggtagatcacgt

SEQ ID NO: 6101836 - DNA, 20 bp, Homo sapien
acggtcagtaggatcgcaca

SEQ ID NO: 6101837 - DNA, 20 bp, Homo sapien
tgtgcgatcctactgaccgt

SEQ ID NO: 6101838 - DNA, 20 bp, Homo sapien
acgctcctgacatcgaatta

SEQ ID NO: 6101839 - DNA, 20 bp, Homo sapien
taattcgatgtcaggagcgt

SEQ ID NO: 6101840 - DNA, 20 bp, Homo sapien
accggcaatctcagacgtga

SEQ ID NO: 6101841 - DNA, 20 bp, Homo sapien
tcacgtctgagattgccggt

SEQ ID NO: 6101842 - DNA, 20 bp, Homo sapien
gtgcgctattctgcatatcg

SEQ ID NO: 6101843 - DNA, 20 bp, Homo sapien
cgatatgcagaatagcgcac

SEQ ID NO: 6101844 - DNA, 20 bp, Homo sapien
acagtcactaggccctgata

SEQ ID NO: 6101845 - DNA, 20 bp, Homo sapien
tatcagggcctagtgactgt

SEQ ID NO: 6101846 - DNA, 20 bp, Homo sapien
acacggctgacggcagaata

SEQ ID NO: 6101847 - DNA, 20 bp, Homo sapien
tattctgccgtcagccgtgt

SEQ ID NO: 6101848 - DNA, 20 bp, Homo sapien
acacgactgaatccagctta

SEQ ID NO: 6101849 - DNA, 20 bp, Homo sapien
taagctggattcagtcgtgt

SEQ ID NO: 6101850 - DNA, 20 bp, Homo sapien
acacagcctcagcgggtata

SEQ ID NO: 6101851 - DNA, 20 bp, Homo sapien
tatacccgctgaggctgtgt

SEQ ID NO: 6101852 - DNA, 20 bp, Homo sapien
aatgtcatcagacgtaggga

SEQ ID NO: 6101853 - DNA, 20 bp, Homo sapien
tccctacgtctgatgacatt

SEQ ID NO: 6101854 - DNA, 20 bp, Homo sapien
aatcgtgcgagccgctacaa

SEQ ID NO: 6101855 - DNA, 20 bp, Homo sapien
ttgtagcggctcgcacgatt

SEQ ID NO: 6101856 - DNA, 20 bp, Homo sapien
aaggagctgacacaggtcca

SEQ ID NO: 6101857 - DNA, 20 bp, Homo sapien
tggacctgtgtcagctcctt

SEQ ID NO: 6101858 - DNA, 20 bp, Homo sapien
aagcgtcatacctagccata

SEQ ID NO: 6101859 - DNA, 20 bp, Homo sapien
tatggctaggtatgacgctt

SEQ ID NO: 6101860 - DNA, 20 bp, Homo sapien
aagccagatcgaccatcgta

SEQ ID NO: 6101861 - DNA, 20 bp, Homo sapien
tacgatggtcgatctggctt

SEQ ID NO: 6101862 - DNA, 20 bp, Homo sapien
aacgaggatcgagcgcacta

SEQ ID NO: 6101863 - DNA, 20 bp, Homo sapien
tagtgcgctcgatcctcgtt

SEQ ID NO: 6101864 - DNA, 20 bp, Homo sapien
gtgcgagcttctgattactg

SEQ ID NO: 6101865 - DNA, 20 bp, Homo sapien
cagtaatcagaagctcgcac

SEQ ID NO: 6101866 - DNA, 20 bp, Homo sapien
tgacacgctttagggtctgt

SEQ ID NO: 6101867 - DNA, 20 bp, Homo sapien
acagaccctaaagcgtgtca

SEQ ID NO: 6101868 - DNA, 20 bp, Homo sapien
tcggacgctttagatgactt

SEQ ID NO: 6101869 - DNA, 20 bp, Homo sapien
aagtcatctaaagcgtccga

SEQ ID NO: 6101870 - DNA, 20 bp, Homo sapien
tcgagtcctttaagatcgct

SEQ ID NO: 6101871 - DNA, 20 bp, Homo sapien
agcgatcttaaaggactcga

SEQ ID NO: 6101872 - DNA, 20 bp, Homo sapien
tcgaagcgtttagaccatgt

SEQ ID NO: 6101873 - DNA, 20 bp, Homo sapien
acatggtctaaacgcttcga

SEQ ID NO: 6101874 - DNA, 20 bp, Homo sapien
tcgaacgtgtcattggtact

SEQ ID NO: 6101875 - DNA, 20 bp, Homo sapien
agtaccaatgacacgttcga

SEQ ID NO: 6101876 - DNA, 20 bp, Homo sapien
taggcgtcttggccgctatt

SEQ ID NO: 6101877 - DNA, 20 bp, Homo sapien
aatagcggccaagacgccta

SEQ ID NO: 6101878 - DNA, 20 bp, Homo sapien
tacggtcgttgcgcgatctt

SEQ ID NO: 6101879 - DNA, 20 bp, Homo sapien
aagatcgcgcaacgaccgta

SEQ ID NO: 6101880 - DNA, 20 bp, Homo sapien
tacgcctcttggagactgtt

SEQ ID NO: 6101881 - DNA, 20 bp, Homo sapien
aacagtctccaagaggcgta

SEQ ID NO: 6101882 - DNA, 20 bp, Homo sapien
tacgccgattgcggagtatt

SEQ ID NO: 6101883 - DNA, 20 bp, Homo sapien
aatactccgcaatcggcgta

SEQ ID NO: 6101884 - DNA, 20 bp, Homo sapien
tacgacgcttgcgcggtatt

SEQ ID NO: 6101885 - DNA, 20 bp, Homo sapien
aataccgcgcaagcgtcgta

SEQ ID NO: 6101886 - DNA, 20 bp, Homo sapien
gccatgtatgctgatatgtc

SEQ ID NO: 6101887 - DNA, 20 bp, Homo sapien
gacatatcagcatacatggc

SEQ ID NO: 6101888 - DNA, 20 bp, Homo sapien
tctatattgcttgagagcgc

SEQ ID NO: 6101889 - DNA, 20 bp, Homo sapien
gcgctctcaagcaatataga

SEQ ID NO: 6101890 - DNA, 25 bp, Homo sapien
tacttctctggtgctcaacaaatgc

SEQ ID NO: 6101891 - DNA, 25 bp, Homo sapien
tcttggggtccttcgagtatccaag

SEQ ID NO: 6101892 - DNA, 25 bp, Homo sapien
ccaatgttgttgtgccatggatccg

SEQ ID NO: 6101893 - DNA, 25 bp, Homo sapien
tctggtgctcaacaaatgcaatggc

SEQ ID NO: 6101894 - DNA, 25 bp, Homo sapien
ctttcaattcctcgagcttcttggg

SEQ ID NO: 6101895 - DNA, 25 bp, Homo sapien
ttcctgagccttaacccagtttcca

SEQ ID NO: 6101896 - DNA, 25 bp, Homo sapien
catatttctatttttacattcatta

SEQ ID NO: 6101897 - DNA, 25 bp, Homo sapien
acgccaacagcgcaagccgcccgtt

SEQ ID NO: 6101898 - DNA, 25 bp, Homo sapien
ttcctcgagcttcttggggtccttc

SEQ ID NO: 6101899 - DNA, 25 bp, Homo sapien
ctacaaacgccaacagcgcaagccg

SEQ ID NO: 6101900 - DNA, 25 bp, Homo sapien
gcacacagaatcctacaaacgccaa

SEQ ID NO: 6101901 - DNA, 25 bp, Homo sapien
tcaaatgcgcctcccgggtacttct

SEQ ID NO: 6101902 - DNA, 25 bp, Homo sapien
ctacagtggatgagctctgactctt

SEQ ID NO: 6101903 - DNA, 25 bp, Homo sapien
agattgtgggcaaagtaccccacgg

SEQ ID NO: 6101904 - DNA, 25 bp, Homo sapien
tgccatggatccgccaagtgagttg

SEQ ID NO: 6101905 - DNA, 25 bp, Homo sapien
ggtacacatatttctatttttacat

SEQ ID NO: 6101906 - DNA, 25 bp, Homo sapien
taaagctcataaggtacacatattt

SEQ ID NO: 6101907 - DNA, 25 bp, Homo sapien
caatggctaagaactcaatggccaa

SEQ ID NO: 6101908 - DNA, 25 bp, Homo sapien
aagccgactgttgcacacagaatcc

SEQ ID NO: 6101909 - DNA, 25 bp, Homo sapien
cgcaagccgcccgttcttgatctct

SEQ ID NO: 6101910 - DNA, 25 bp, Homo sapien
agaatcctacaaacgccaacagcgc

SEQ ID NO: 6101911 - DNA, 25 bp, Homo sapien
cagtgtttttgatacacataaagct

SEQ ID NO: 6101912 - DNA, 25 bp, Homo sapien
ccaggaacagcgagcatagcccatc

SEQ ID NO: 6101913 - DNA, 25 bp, Homo sapien
ttcttcttctcagggtctttctcca

SEQ ID NO: 6101914 - DNA, 25 bp, Homo sapien
gccaagtgagttgccaagttctcca

SEQ ID NO: 6101915 - DNA, 25 bp, Homo sapien
aatctgtctttcattacacagtgtt

SEQ ID NO: 6101916 - DNA, 25 bp, Homo sapien
gttcttgatctctttaactttcaat

SEQ ID NO: 6101917 - DNA, 25 bp, Homo sapien
agtggcttgaccccctggtagtgct

SEQ ID NO: 6101918 - DNA, 25 bp, Homo sapien
caggaattcacaaatctgtctttca

SEQ ID NO: 6101919 - DNA, 25 bp, Homo sapien
ggatccgccaagtgagttgccaagt

SEQ ID NO: 6101920 - DNA, 25 bp, Homo sapien
aaaatcccaggaacagcgagcatag

SEQ ID NO: 6101921 - DNA, 25 bp, Homo sapien
tgagttgccaagttctccaatggtc

SEQ ID NO: 6101922 - DNA, 25 bp, Homo sapien
ccgcccgttcttgatctctttaact

SEQ ID NO: 6101923 - DNA, 25 bp, Homo sapien
actgttgcacacagaatcctacaaa

SEQ ID NO: 6101924 - DNA, 25 bp, Homo sapien
taatgcttctggtaccaaaatccca

SEQ ID NO: 6101925 - DNA, 25 bp, Homo sapien
gatctctttaactttcaattcctcg

SEQ ID NO: 6101926 - DNA, 25 bp, Homo sapien
agccttaacccagtttccatatcct

SEQ ID NO: 6101927 - DNA, 25 bp, Homo sapien
gagcttcttggggtccttcgagtat

SEQ ID NO: 6101928 - DNA, 25 bp, Homo sapien
agagggtcaaatgcgcctcccgggt

SEQ ID NO: 6101929 - DNA, 25 bp, Homo sapien
aaattacaggaattcacaaatctgt

SEQ ID NO: 6101930 - DNA, 25 bp, Homo sapien
taccaaaatcccaggaacagcgagc

SEQ ID NO: 6101931 - DNA, 25 bp, Homo sapien
tacacataaagctcataaggtacac

SEQ ID NO: 6101932 - DNA, 25 bp, Homo sapien
tttacattcattagttgaaagggat

SEQ ID NO: 6101933 - DNA, 25 bp, Homo sapien
taacaatatcgccaatgttgttgtg

SEQ ID NO: 6101934 - DNA, 25 bp, Homo sapien
atatcgccaatgttgttgtgccatg

SEQ ID NO: 6101935 - DNA, 25 bp, Homo sapien
aacagcgcaagccgcccgttcttga

SEQ ID NO: 6101936 - DNA, 25 bp, Homo sapien
tctccaatggtcctgtccccgggta

SEQ ID NO: 6101937 - DNA, 25 bp, Homo sapien
gccaagttctccaatggtcctgtcc

SEQ ID NO: 6101938 - DNA, 25 bp, Homo sapien
attacacagtgtttttgatacacat

SEQ ID NO: 6101939 - DNA, 25 bp, Homo sapien
tctatttttacattcattagttgaa

SEQ ID NO: 6101940 - DNA, 25 bp, Homo sapien
ctaagaactcaatggccaagattgt

SEQ ID NO: 6101941 - DNA, 25 bp, Homo sapien
ggtctttctccatacttctctggtg

SEQ ID NO: 6101942 - DNA, 25 bp, Homo sapien
cgggtacttcttcttctcagggtct

SEQ ID NO: 6101943 - DNA, 25 bp, Homo sapien
gcctcccgggtacttcttcttctca

SEQ ID NO: 6101944 - DNA, 25 bp, Homo sapien
tagtgctgcccattcctgagcctta

SEQ ID NO: 6101945 - DNA, 25 bp, Homo sapien
actcaatggccaagattgtgggcaa

SEQ ID NO: 6101946 - DNA, 25 bp, Homo sapien
tcataaggtacacatatttctattt

SEQ ID NO: 6101947 - DNA, 25 bp, Homo sapien
gatcaccaagacaaattacaggaat

SEQ ID NO: 6101948 - DNA, 25 bp, Homo sapien
caagtaagtggcttgaccccctggt

SEQ ID NO: 6101949 - DNA, 25 bp, Homo sapien
acagcgagcatagcccatctacagt

SEQ ID NO: 6101950 - DNA, 25 bp, Homo sapien
ttctggtaccaaaatcccaggaaca

SEQ ID NO: 6101951 - DNA, 25 bp, Homo sapien
caagacaaattacaggaattcacaa

SEQ ID NO: 6101952 - DNA, 25 bp, Homo sapien
tggccaagattgtgggcaaagtacc

SEQ ID NO: 6101953 - DNA, 25 bp, Homo sapien
tatccaagagggtcaaatgcgcctc

SEQ ID NO: 6101954 - DNA, 25 bp, Homo sapien
ttcgagtatccaagagggtcaaatg

SEQ ID NO: 6101955 - DNA, 25 bp, Homo sapien
agcatagcccatctacagtggatga

SEQ ID NO: 6101956 - DNA, 25 bp, Homo sapien
ttgttgtgccatggatccgccaagt

SEQ ID NO: 6101957 - DNA, 25 bp, Homo sapien
gtttccatatcctaatgcttctggt

SEQ ID NO: 6101958 - DNA, 25 bp, Homo sapien
cacgagcattcgatcaccaagacaa

SEQ ID NO: 6101959 - DNA, 25 bp, Homo sapien
gcattcgatcaccaagacaaattac

SEQ ID NO: 6101960 - DNA, 25 bp, Homo sapien
ttgaccccctggtagtgctgcccat

SEQ ID NO: 6101961 - DNA, 25 bp, Homo sapien
tctccatacttctctggtgctcaac

SEQ ID NO: 6101962 - DNA, 25 bp, Homo sapien
ttttgatacacataaagctcataag

SEQ ID NO: 6101963 - DNA, 25 bp, Homo sapien
tgggtttcccaagtaagtggcttga

SEQ ID NO: 6101964 - DNA, 25 bp, Homo sapien
tctttcattacacagtgtttttgat

SEQ ID NO: 6101965 - DNA, 25 bp, Homo sapien
aacccagtttccatatcctaatgct

SEQ ID NO: 6101966 - DNA, 25 bp, Homo sapien
tggatgagctctgactctttgtatc

SEQ ID NO: 6101967 - DNA, 25 bp, Homo sapien
tctcagggtctttctccatacttct

SEQ ID NO: 6101968 - DNA, 25 bp, Homo sapien
ccgggtaagccgactgttgcacaca

SEQ ID NO: 6101969 - DNA, 25 bp, Homo sapien
gctcaacaaatgcaatggctaagaa

SEQ ID NO: 6101970 - DNA, 25 bp, Homo sapien
agttgaaagggataacaatatcgcc

SEQ ID NO: 6101971 - DNA, 25 bp, Homo sapien
gcccatctacagtggatgagctctg

SEQ ID NO: 6101972 - DNA, 25 bp, Homo sapien
aagggataacaatatcgccaatgtt

SEQ ID NO: 6101973 - DNA, 25 bp, Homo sapien
ttcacaaatctgtctttcattacac

SEQ ID NO: 6101974 - DNA, 25 bp, Homo sapien
ttcattagttgaaagggataacaat

SEQ ID NO: 6101975 - DNA, 25 bp, Homo sapien
ctgtccccgggtaagccgactgttg

SEQ ID NO: 6101976 - DNA, 25 bp, Homo sapien
atatcctaatgcttctggtaccaaa

SEQ ID NO: 6101977 - DNA, 25 bp, Homo sapien
ctttaactttcaattcctcgagctt

SEQ ID NO: 6101978 - DNA, 25 bp, Homo sapien
ggtccttcgagtatccaagagggtc

SEQ ID NO: 6101979 - DNA, 25 bp, Homo sapien
tgcccattcctgagccttaacccag

SEQ ID NO: 6101980 - DNA, 25 bp, Homo sapien
caaatgcaatggctaagaactcaat

SEQ ID NO: 6101981 - DNA, 25 bp, Homo sapien
ccctggtagtgctgcccattcctga

SEQ ID NO: 6101982 - DNA, 25 bp, Homo sapien
ttagaaaatttgtccacatttggga

SEQ ID NO: 6101983 - DNA, 25 bp, Homo sapien
tcataagcccgtttcccatcatcga

SEQ ID NO: 6101984 - DNA, 25 bp, Homo sapien
tccagataaagaccctacaaaccta

SEQ ID NO: 6101985 - DNA, 25 bp, Homo sapien
tgtttggtacaagagggacaaatgt

SEQ ID NO: 6101986 - DNA, 25 bp, Homo sapien
aaacggcgagttgtgaccataagcc

SEQ ID NO: 6101987 - DNA, 25 bp, Homo sapien
gagcaacattgtgattgacgataag

SEQ ID NO: 6101988 - DNA, 25 bp, Homo sapien
cgataagccttttatgttgtccggg

SEQ ID NO: 6101989 - DNA, 25 bp, Homo sapien
tatccataaaagagagttgcccata

SEQ ID NO: 6101990 - DNA, 25 bp, Homo sapien
ttcccagttcgagccatgattatag

SEQ ID NO: 6101991 - DNA, 25 bp, Homo sapien
gaatatttccatatccataaaagag

SEQ ID NO: 6101992 - DNA, 25 bp, Homo sapien
catcgagagcaacattgtgattgac

SEQ ID NO: 6101993 - DNA, 25 bp, Homo sapien
ccactgcatctctccacaaagccag

SEQ ID NO: 6101994 - DNA, 25 bp, Homo sapien
ttgccacacagttttgctaagctta

SEQ ID NO: 6101995 - DNA, 25 bp, Homo sapien
cataagagttgctgtccatccagat

SEQ ID NO: 6101996 - DNA, 25 bp, Homo sapien
taaaagagagttgcccatagcgaac

SEQ ID NO: 6101997 - DNA, 25 bp, Homo sapien
catgaacataagagttgctgtccat

SEQ ID NO: 6101998 - DNA, 25 bp, Homo sapien
ggtataagcaaagaatatttccata

SEQ ID NO: 6101999 - DNA, 25 bp, Homo sapien
ataagccactgcatctctccacaaa

SEQ ID NO: 6102000 - DNA, 25 bp, Homo sapien
agatactgtttggtacaagagggac

SEQ ID NO: 6102001 - DNA, 25 bp, Homo sapien
gattgacgataagccttttatgttg

SEQ ID NO: 6102002 - DNA, 25 bp, Homo sapien
tgcaatttaccaggtataagcaaag

SEQ ID NO: 6102003 - DNA, 25 bp, Homo sapien
cattgtgattgacgataagcctttt

SEQ ID NO: 6102004 - DNA, 25 bp, Homo sapien
tgtccatccagataaagaccctaca

SEQ ID NO: 6102005 - DNA, 25 bp, Homo sapien
acatgatttgaggaagaacggagag

SEQ ID NO: 6102006 - DNA, 25 bp, Homo sapien
gcgaaccagtgagccacatcaaatc

SEQ ID NO: 6102007 - DNA, 25 bp, Homo sapien
cacagttttgctaagcttaccgaaa

SEQ ID NO: 6102008 - DNA, 25 bp, Homo sapien
taccaaaagcagttgtcccaggcaa

SEQ ID NO: 6102009 - DNA, 25 bp, Homo sapien
aagcagttgtcccaggcaagatact

SEQ ID NO: 6102010 - DNA, 25 bp, Homo sapien
gatctaaacggcgagttgtgaccat

SEQ ID NO: 6102011 - DNA, 25 bp, Homo sapien
cacggataaatagtgctcgagggat

SEQ ID NO: 6102012 - DNA, 25 bp, Homo sapien
acacctttctctgaaagtttcccag

SEQ ID NO: 6102013 - DNA, 25 bp, Homo sapien
aactggcatccacatgaacataaga

SEQ ID NO: 6102014 - DNA, 25 bp, Homo sapien
tcaaatcacggataaatagtgctcg

SEQ ID NO: 6102015 - DNA, 25 bp, Homo sapien
gtccaccaatagtgataacgtcttc

SEQ ID NO: 6102016 - DNA, 25 bp, Homo sapien
caaatgttgaccacatgatttgagg

SEQ ID NO: 6102017 - DNA, 25 bp, Homo sapien
catctctccacaaagccagtcctat

SEQ ID NO: 6102018 - DNA, 25 bp, Homo sapien
gtgaccataagccactgcatctctc

SEQ ID NO: 6102019 - DNA, 25 bp, Homo sapien
caaaaacaagttctttcaaagatct

SEQ ID NO: 6102020 - DNA, 25 bp, Homo sapien
gtcctatccatgagatcaaaccaat

SEQ ID NO: 6102021 - DNA, 25 bp, Homo sapien
gtcttcccacagttgccacacagtt

SEQ ID NO: 6102022 - DNA, 25 bp, Homo sapien
gtacaagagggacaaatgttgacca

SEQ ID NO: 6102023 - DNA, 25 bp, Homo sapien
agatcaaaccaattgtagctgccac

SEQ ID NO: 6102024 - DNA, 25 bp, Homo sapien
ggctggtgcaatttaccaggtataa

SEQ ID NO: 6102025 - DNA, 25 bp, Homo sapien
ttgaccacatgatttgaggaagaac

SEQ ID NO: 6102026 - DNA, 25 bp, Homo sapien
catccacatgaacataagagttgct

SEQ ID NO: 6102027 - DNA, 25 bp, Homo sapien
ctgccacgaagaatgactggctggt

SEQ ID NO: 6102028 - DNA, 25 bp, Homo sapien
caatagtgataacgtcttcccacag

SEQ ID NO: 6102029 - DNA, 25 bp, Homo sapien
aaccaattgtagctgccacgaagaa

SEQ ID NO: 6102030 - DNA, 25 bp, Homo sapien
ccacagttgccacacagttttgcta

SEQ ID NO: 6102031 - DNA, 25 bp, Homo sapien
ttcaaagatctaaacggcgagttgt

SEQ ID NO: 6102032 - DNA, 25 bp, Homo sapien
cccatagcgaaccagtgagccacat

SEQ ID NO: 6102033 - DNA, 25 bp, Homo sapien
ttgtagctgccacgaagaatgactg

SEQ ID NO: 6102034 - DNA, 25 bp, Homo sapien
ttatagctgccacagcaataccaaa

SEQ ID NO: 6102035 - DNA, 25 bp, Homo sapien
ctgccacagcaataccaaaagcagt

SEQ ID NO: 6102036 - DNA, 25 bp, Homo sapien
ttgtcccaggcaagatactgtttgg

SEQ ID NO: 6102037 - DNA, 25 bp, Homo sapien
tcccatcatcgagagcaacattgtg

SEQ ID NO: 6102038 - DNA, 25 bp, Homo sapien
atgactggctggtgcaatttaccag

SEQ ID NO: 6102039 - DNA, 25 bp, Homo sapien
ccacatttgggaaactggcatccac

SEQ ID NO: 6102040 - DNA, 25 bp, Homo sapien
ttaccaggtataagcaaagaatatt

SEQ ID NO: 6102041 - DNA, 25 bp, Homo sapien
cagtgagccacatcaaatcacggat

SEQ ID NO: 6102042 - DNA, 25 bp, Homo sapien
gccatgattatagctgccacagcaa

SEQ ID NO: 6102043 - DNA, 25 bp, Homo sapien
gaagaacggagagtccaccaatagt

SEQ ID NO: 6102044 - DNA, 25 bp, Homo sapien
aagccagtcctatccatgagatcaa

SEQ ID NO: 6102045 - DNA, 25 bp, Homo sapien
tgataacgtcttcccacagttgcca

SEQ ID NO: 6102046 - DNA, 25 bp, Homo sapien
gccacatcaaatcacggataaatag

SEQ ID NO: 6102047 - DNA, 25 bp, Homo sapien
cagcaataccaaaagcagttgtccc

SEQ ID NO: 6102048 - DNA, 25 bp, Homo sapien
gcccgtttcccatcatcgagagcaa

SEQ ID NO: 6102049 - DNA, 25 bp, Homo sapien
agttgctgtccatccagataaagac

SEQ ID NO: 6102050 - DNA, 25 bp, Homo sapien
agttctttcaaagatctaaacggcg

SEQ ID NO: 6102051 - DNA, 25 bp, Homo sapien
gagggatcataagcccgtttcccat

SEQ ID NO: 6102052 - DNA, 25 bp, Homo sapien
gagggacaaatgttgaccacatgat

SEQ ID NO: 6102053 - DNA, 25 bp, Homo sapien
cgaagaatgactggctggtgcaatt

SEQ ID NO: 6102054 - DNA, 25 bp, Homo sapien
caggcaagatactgtttggtacaag

SEQ ID NO: 6102055 - DNA, 25 bp, Homo sapien
gaaagtttcccagttcgagccatga

SEQ ID NO: 6102056 - DNA, 25 bp, Homo sapien
tttgaggaagaacggagagtccacc

SEQ ID NO: 6102057 - DNA, 25 bp, Homo sapien
tccatgagatcaaaccaattgtagc

SEQ ID NO: 6102058 - DNA, 25 bp, Homo sapien
tccacaaagccagtcctatccatga

SEQ ID NO: 6102059 - DNA, 25 bp, Homo sapien
aatttgtccacatttgggaaactgg

SEQ ID NO: 6102060 - DNA, 25 bp, Homo sapien
cctacaaacctaacacctttctctg

SEQ ID NO: 6102061 - DNA, 25 bp, Homo sapien
ttgggaaactggcatccacatgaac

SEQ ID NO: 6102062 - DNA, 25 bp, Homo sapien
agcaaagaatatttccatatccata

SEQ ID NO: 6102063 - DNA, 25 bp, Homo sapien
gagttgcccatagcgaaccagtgag

SEQ ID NO: 6102064 - DNA, 25 bp, Homo sapien
gtgctcgagggatcataagcccgtt

SEQ ID NO: 6102065 - DNA, 25 bp, Homo sapien
ttctctgaaagtttcccagttcgag

SEQ ID NO: 6102066 - DNA, 25 bp, Homo sapien
gttcgagccatgattatagctgcca

SEQ ID NO: 6102067 - DNA, 25 bp, Homo sapien
taaatagtgctcgagggatcataag

SEQ ID NO: 6102068 - DNA, 25 bp, Homo sapien
cgagttgtgaccataagccactgca

SEQ ID NO: 6102069 - DNA, 25 bp, Homo sapien
cggagagtccaccaatagtgataac

SEQ ID NO: 6102070 - DNA, 25 bp, Homo sapien
caaacctaacacctttctctgaaag

SEQ ID NO: 6102071 - DNA, 25 bp, Homo sapien
tttccatatccataaaagagagttg

SEQ ID NO: 6102072 - DNA, 25 bp, Homo sapien
acagcaaattaataagcaggataat

SEQ ID NO: 6102073 - DNA, 25 bp, Homo sapien
gtcatctcgggttgctcgaacacgg

SEQ ID NO: 6102074 - DNA, 25 bp, Homo sapien
ttcaggaactggcaggtttacttgc

SEQ ID NO: 6102075 - DNA, 25 bp, Homo sapien
tgtgttgtacatcataaaaaaaaaa

SEQ ID NO: 6102076 - DNA, 25 bp, Homo sapien
agaggacaagatccaatccacaatt

SEQ ID NO: 6102077 - DNA, 25 bp, Homo sapien
gagttaacgagcctctttccgatct

SEQ ID NO: 6102078 - DNA, 25 bp, Homo sapien
gatggcgtcagcgtttgcgtctccc

SEQ ID NO: 6102079 - DNA, 25 bp, Homo sapien
gcaggtttacttgctgggctccttt

SEQ ID NO: 6102080 - DNA, 25 bp, Homo sapien
tggactctcttgacattctcttgtt

SEQ ID NO: 6102081 - DNA, 25 bp, Homo sapien
taagcaggataatattgctcaaaag

SEQ ID NO: 6102082 - DNA, 25 bp, Homo sapien
aaagttttcagccacaggatcagta

SEQ ID NO: 6102083 - DNA, 25 bp, Homo sapien
tcccttgagttaacgagcctctttc

SEQ ID NO: 6102084 - DNA, 25 bp, Homo sapien
gtttgcgtctcccaaagcagcctgg

SEQ ID NO: 6102085 - DNA, 25 bp, Homo sapien
ccaatccacaattacacaaaggaga

SEQ ID NO: 6102086 - DNA, 25 bp, Homo sapien
caagatccaatccacaattacacaa

SEQ ID NO: 6102087 - DNA, 25 bp, Homo sapien
gcaagttggactctcttgacattct

SEQ ID NO: 6102088 - DNA, 25 bp, Homo sapien
agagacaataggagtaaaacagcaa

SEQ ID NO: 6102089 - DNA, 25 bp, Homo sapien
ccgtagaaagttccgcggccgatgg

SEQ ID NO: 6102090 - DNA, 25 bp, Homo sapien
tccatcacaagcatgtttccgtatt

SEQ ID NO: 6102091 - DNA, 25 bp, Homo sapien
ttacttgctgggctccttttcctgc

SEQ ID NO: 6102092 - DNA, 25 bp, Homo sapien
ggataatattgctcaaaagttgtag

SEQ ID NO: 6102093 - DNA, 25 bp, Homo sapien
atcgtcacttctagccgttggatca

SEQ ID NO: 6102094 - DNA, 25 bp, Homo sapien
taccaatgtgttgtacatcataaaa

SEQ ID NO: 6102095 - DNA, 25 bp, Homo sapien
ggctgaggtaggtctcggcaagttg

SEQ ID NO: 6102096 - DNA, 25 bp, Homo sapien
agcttctcataagtcatctcgggtt

SEQ ID NO: 6102097 - DNA, 25 bp, Homo sapien
acgagcctctttccgatcttctcaa

SEQ ID NO: 6102098 - DNA, 25 bp, Homo sapien
aaattaccaatgtgttgtacatcat

SEQ ID NO: 6102099 - DNA, 25 bp, Homo sapien
atgtttccgtattccataagcttct

SEQ ID NO: 6102100 - DNA, 25 bp, Homo sapien
agtaaaacagcaaattaataagcag

SEQ ID NO: 6102101 - DNA, 25 bp, Homo sapien
caagtcaagtaagtttaacttcaga

SEQ ID NO: 6102102 - DNA, 25 bp, Homo sapien
gaactggcaggtttacttgctgggc

SEQ ID NO: 6102103 - DNA, 25 bp, Homo sapien
ggtaggtctcggcaagttggactct

SEQ ID NO: 6102104 - DNA, 25 bp, Homo sapien
tgctcgaacacgggaggtccttccc

SEQ ID NO: 6102105 - DNA, 25 bp, Homo sapien
tcaaaagttgtagacacaggttcca

SEQ ID NO: 6102106 - DNA, 25 bp, Homo sapien
tttctcttttacattttcataccca

SEQ ID NO: 6102107 - DNA, 25 bp, Homo sapien
acaagcatgtttccgtattccataa

SEQ ID NO: 6102108 - DNA, 25 bp, Homo sapien
cattttcttctctttctcttttaca

SEQ ID NO: 6102109 - DNA, 25 bp, Homo sapien
tggatcaaagttttcagccacagga

SEQ ID NO: 6102110 - DNA, 25 bp, Homo sapien
gtctcggcaagttggactctcttga

SEQ ID NO: 6102111 - DNA, 25 bp, Homo sapien
agccgttggatcaaagttttcagcc

SEQ ID NO: 6102112 - DNA, 25 bp, Homo sapien
agttccgcggccgatggcgtcagcg

SEQ ID NO: 6102113 - DNA, 25 bp, Homo sapien
cacaattacacaaaggagaaaaata

SEQ ID NO: 6102114 - DNA, 25 bp, Homo sapien
gttgtagacacaggttccatcgtca

SEQ ID NO: 6102115 - DNA, 25 bp, Homo sapien
aataggagtaaaacagcaaattaat

SEQ ID NO: 6102116 - DNA, 25 bp, Homo sapien
cagcctggctgaggtaggtctcggc

SEQ ID NO: 6102117 - DNA, 25 bp, Homo sapien
tattgctcaaaagttgtagacacag

SEQ ID NO: 6102118 - DNA, 25 bp, Homo sapien
catacccagtggccaactaaaccaa

SEQ ID NO: 6102119 - DNA, 25 bp, Homo sapien
cacaggatcagtacacccttcagga

SEQ ID NO: 6102120 - DNA, 25 bp, Homo sapien
acattctcttgttccatcacaagca

SEQ ID NO: 6102121 - DNA, 25 bp, Homo sapien
agggaacaaaagaggacaagatcca

SEQ ID NO: 6102122 - DNA, 25 bp, Homo sapien
aacaaaagaggacaagatccaatcc

SEQ ID NO: 6102123 - DNA, 25 bp, Homo sapien
aattaataagcaggataatattgct

SEQ ID NO: 6102124 - DNA, 25 bp, Homo sapien
acttctagccgttggatcaaagttt

SEQ ID NO: 6102125 - DNA, 25 bp, Homo sapien
tccataagcttctcataagtcatct

SEQ ID NO: 6102126 - DNA, 25 bp, Homo sapien
ttcctgcaagtcaagtaagtttaac

SEQ ID NO: 6102127 - DNA, 25 bp, Homo sapien
gtcagcgtttgcgtctcccaaagca

SEQ ID NO: 6102128 - DNA, 25 bp, Homo sapien
ccaaagcagcctggctgaggtaggt

SEQ ID NO: 6102129 - DNA, 25 bp, Homo sapien
ttttacattttcatacccagtggcc

SEQ ID NO: 6102130 - DNA, 25 bp, Homo sapien
tccttcccttgagttaacgagcctc

SEQ ID NO: 6102131 - DNA, 25 bp, Homo sapien
gacacaggttccatcgtcacttcta

SEQ ID NO: 6102132 - DNA, 25 bp, Homo sapien
ctccttttcctgcaagtcaagtaag

SEQ ID NO: 6102133 - DNA, 25 bp, Homo sapien
tcgggttgctcgaacacgggaggtc

SEQ ID NO: 6102134 - DNA, 25 bp, Homo sapien
gcggccgatggcgtcagcgtttgcg

SEQ ID NO: 6102135 - DNA, 25 bp, Homo sapien
taattccattttcttctctttctct

SEQ ID NO: 6102136 - DNA, 25 bp, Homo sapien
attttcatacccagtggccaactaa

SEQ ID NO: 6102137 - DNA, 25 bp, Homo sapien
ccgtattccataagcttctcataag

SEQ ID NO: 6102138 - DNA, 25 bp, Homo sapien
ctcttgacattctcttgttccatca

SEQ ID NO: 6102139 - DNA, 25 bp, Homo sapien
tcataagtcatctcgggttgctcga

SEQ ID NO: 6102140 - DNA, 25 bp, Homo sapien
caaaagagacaataggagtaaaaca

SEQ ID NO: 6102141 - DNA, 25 bp, Homo sapien
cttctctttctcttttacattttca

SEQ ID NO: 6102142 - DNA, 25 bp, Homo sapien
cgtctcccaaagcagcctggctgag

SEQ ID NO: 6102143 - DNA, 25 bp, Homo sapien
acacccttcaggaactggcaggttt

SEQ ID NO: 6102144 - DNA, 25 bp, Homo sapien
ttcagccacaggatcagtacaccct

SEQ ID NO: 6102145 - DNA, 25 bp, Homo sapien
ggttccatcgtcacttctagccgtt

SEQ ID NO: 6102146 - DNA, 25 bp, Homo sapien
gctgggctccttttcctgcaagtca

SEQ ID NO: 6102147 - DNA, 25 bp, Homo sapien
atcagtacacccttcaggaactggc

SEQ ID NO: 6102148 - DNA, 25 bp, Homo sapien
ataaaccaaaagagacaataggagt

SEQ ID NO: 6102149 - DNA, 25 bp, Homo sapien
tcttgttccatcacaagcatgtttc
